(19) United States
(12) Patent Application Publication
(10) Pub. No.: US 2009/0165176 A1
(43) Pub. Date: Jun. 25, 2009

(54) Artificial Plant Minichromosomes

(75) Inventors: Evgueni Ananiev, Johnston, IA (US); Olga N. Danilevskaya, Johnston, IA (US); Mark A. Chamberlin, Windsor Heights, IA (US); William J. Gordon-Kamm, Urbandale, IA (US); Sergei Svitashev, Johnston, IA (US); Chengcang C. Wu, Middleton, WI (US)

Correspondence Address: PIONEER HI-BRED INTERNATIONAL, INC., 7250 N.W. 62ND AVENUE, P.O. BOX 552, JOHNSTON, IA, 50131-0552, US

(73) Assignee: PIONEER HI-BRED INTERNATIONAL, INC., Johnston, IA (US)

(21) Appl. No.: 12/181,380

(22) Filed: Jul. 29, 2008

Related U.S. Application Data
(63) Continuation-in-part of application No. 12/142,953, filed on Jun. 20, 2008.
Application No. 12/142,953 is a continuation of application No. 11/804,325, filed on May 17, 2007.
(60) Provisional application No. 60/801,004, filed on May 17, 2006.

(51) Int. Cl. A01H 5/00; C12N 1/00; C12N 5/04

(52) U.S. Cl. 800/306; 800/298; 800/320.1; 800/320.2; 800/320.3; 800/320; 800/312; 800/322; 800/314; 435/317.1; 435/419; 435/412; 435/416; 435/415

(57) ABSTRACT

Artificial plant minichromosomes comprising a functional centromere which specifically bind centromeric protein C (CENPC) and methods for making such minichromosomes are described.

### CROSS-REFERENCE TO RELATED APPLICATIONS

[0001] This application is a continuation-in-part of co-pending applications U.S. Ser. No. 12/142,953 filed Jun. 20, 2008, and U.S. Ser. No. 11/804,325 filed May 17, 2007, which claim the benefit of U.S. Provisional Application No. 60/801,004 filed May 17, 2006, the entire contents of which are each herein incorporated by reference.

### FIELD OF THE INVENTION

[0002] This invention is in the field of plant biotechnology; in particular, this pertains to artificial minichromosomes and to methods of making such minichromosomes in a plant.

### BACKGROUND

[0003] Recent advances in chromosome engineering have made it possible to alter the genome of plant, thus, altering its phenotype. When a transgene is integrated into a plant genome, it is usually in a random fashion and in an unpredictable copy number. Accordingly, research efforts have been directed toward better controlling transgene integration.

[0004] Given this need, researchers have wondered if the answer might lie in the use of artificial minichromosomes. These are man-made linear or circular DNA molecules constructed from cis-acting DNA sequence elements that provide replication and partitioning of the constructed minichromosomes.

[0005] It is believed that production of artificial chromosomes would reduce or eliminate some issues associated with random genomic integrations into a native plant chromosome, for example linkage drag due to association of the transgene with genomic material from the host plant. Artificial chromosomes may also provide means to deliver 10-100 times more genes than standard transformation vectors, and to provide large chromosomal segments for complementation and/or map-based cloning.

[0006] Three components have been identified for artificial chromosome replication, stability, and maintenance/inheritance: (i) autonomous replication sequences which function as an origin of replication; (ii) telomeres which function to stabilize and maintain the ends of linear chromosomes; and, (iii) centromeres which are the site of kinetochore assembly for proper chromosome segregation in mitosis and meiosis. Isolated centromeres from unicellular organisms, such as yeast, do not function in higher eukaryotes.

[0007] U.S. Pat. No. 5,270,201, issued to Richards, et al., on Dec. 14, 1993, describes plant artificial chromosomes based on telomeres and, optionally, a centromere.

[0008] U.S. Pat. No. 7,119,250, issued to Luo, et al., on Oct. 10, 2006, describes plant centromere compositions.

[0009] U.S. Pat. No. 7,132,240, issued to Richards, et al., on Nov. 7, 2006, describes a method to isolate methylated centromere DNA potentially from any centromere in an organism.

[0010] U.S. Pat. No. 7,193,128, issued to Copenhaver, et al., on Mar. 20, 2007, describes a method for generating or increasing revenue from crops using nucleic acid sequences of plant centromeres.

[0011] PCT Application having publication number WO 2007/030510 that was published on Mar. 15, 2007 describes methods of making plants transformed with autonomous minichromosomes.

### SUMMARY

[0012] The present invention concerns an artificial plant minichromosome comprising a functional centromere containing: (a) at least two arrays of tandem repeats of CentC in an inverted orientation wherein the first array comprises at least fifty copies of CentC and the second array comprises at least fifty copies of CentC; and, (b) at least one copy of a retrotransposable element, wherein the retrotransposable element is situated between the first and the second array.

[0013] In a second embodiment, an artificial plant minichromosome of the invention comprises a retrotransposable element selected from the group consisting of CentA, CRM1, and CRM2. In a third embodiment, the artificial plant minichromosome of the invention also comprises at least one functional telomere.

[0014] In a fourth embodiment, the functional centromere, comprised by the artificial plant minichromosome specifically binds centromeric protein C (CENPC).

[0015] In a fifth embodiment, a corn plant can comprise any of the artificial minichromosomes of the invention.

[0016] In a sixth embodiment, the present invention concerns an artificial plant minichromosome comprising a functional centromere, wherein the centromere specifically binds centromeric protein C (CENPC).

[0017] In a seventh embodiment, the invention concerns an isolated polynucleotide comprising: (a) at least two arrays of tandem repeats of CentC in an inverted orientation wherein the first array comprises at least ten copies of CentC and the second array comprises at least ten copies of CentC; and, (b) at least one copy of a retrotransposable element, wherein the retrotransposable element is situated between the first and the second array.

[0018] In an eighth embodiment, the isolated polynucleotide of the invention comprises a retrotransposable element which is selected from the group consisting of CentA, CRM1, and CRM2.

[0019] In a ninth embodiment, the invention concerns an isolated polynucleotide comprising: (a) at least one array of tandem repeats of CentC, the array comprising at least 10 copies of CentC; and, (b) at least one copy of a retrotransposable element selected from the group consisting of CentA, CRM1, and CRM2.

[0020] In a tenth embodiment, the invention concerns an isolated polynucleotide comprising: (a) at least one array of tandem repeats of CentC, the array comprising at least 10 copies of CentC; and, (b) at least one copy each of CentA, CRM1, and CRM2.

[0021] In an eleventh embodiment, the invention concerns a recombinant construct comprising any of the isolated polynucleotides of the invention as well as a transgenic corn plant comprising such recombinant constructs.

[0022] In a twelfth embodiment, the invention concerns a method for making a transgenic corn plant comprising an artificial plant minichromosome having a functional centromere the method comprising:

[0023] (a) contacting at least one corn plant cell with a mixture comprising a recombinant construct of the invention;

[0024] (b) identifying at least one corn plant cell from step (a) comprising an artificial plant minichromosome having a functional centromere; and

[0025] (c) regenerating a fertile corn plant from the corn plant cell of step (b) wherein said corn plant comprises an artificial plant minichromosome having a functional centromere. The mixture can also comprise a polynucleotide encoding a polypeptide for stimulating cell growth wherein the polypeptide is selected from the group consisting of a wuschel, a baby boom, a RepA, or a Lec1.

### BRIEF DESCRIPTION OF THE DRAWINGS

[0026] The invention can be more fully understood from the following detailed description and the accompanying drawings and Sequence Listing, which form a part of this application.

[0027] FIG. 1. Fluorescent in situ hybridization (FISH) on a mitotic chromosomal spread of maize embryogenic calli from Hi-II transformation CMC3 pool 1 event #14. Calli were derived from immature embryos transformed with linearized BAC clone pool 1 retrofitted with Tn5-3. Prometaphase (left) and metaphase (right) nuclei both show the 20 native chromosomes plus 1 minichromosome (arrows and insets). Both minichromosomes are positive for the CentC (green—color; white—greyscale) centromere-specific repeat and the unique marker probe 23715 (red—color; white—greyscale) specific to the transformation construct, with both CentC and 23715 being essentially colocalized in the minichromosome (insets).

[0028] FIG. 2. FISH on a mitotic chromosomal spread of maize embryogenic calli from Hi-II transformation CMC3 pool 1 event #14. Calli were derived from immature embryos transformed with linearized BAC clone pool 1 retrofitted with Tn5-3. Panel A shows a metaphase nucleus showing the 20 native chromosomes plus 2 minichromosomes (box). Both minichromosomes are positive for the CentC (green—color; white—greyscale) centromere-specific repeat and the unique marker probe 23715 (red—color; white—greyscale) specific to the transformation construct. Panels B-D are higher magnification of the box showing the minichromosomes (arrowheads) with: B—DAPI only; C—DAPI+23715 probe (red—color; white—greyscale); and D—DAPI+CentC probe (green—color; white—greyscale).

[0029] FIG. 3. Immunofluorescence on a mitotic chromosomal spread of maize embryogenic calli from Hi-II transformation CMC3 pool 1 event #14. Calli were derived from immature embryos transformed with linearized BAC clone pool 1 retrofitted with Tn5-3. Panel A shows a metaphase nucleus showing the 20 native chromosomes plus 1 minichromosome (arrow). All centromeres of the native chromosomes and the minichromosome are positive for Centromeric Protein C, CENPC (red—color; white—greyscale), a centromere/kinetochore-specific protein. Panels B-C show higher magnification of the minichromosome with: B—DAPI only; and C—DAPI+CENPC (red—color; white—greyscale). The morphology and immunolocalization of CENPC indicates that the minichromosome is composed of two sister chromatids each having a functional centromere.

[0030] FIG. 4. Panel A—Immunofluorescence on a mitotic chromosomal spread of maize embryogenic calli from Hi-II transformation CMC3 pool 1 event #14. Calli were derived from immature embryos transformed with linearized BAC clone pool 1 retrofitted with Tn5-3. Separation of sister chromatids of the native chromosomes and the minichromosome (box) was observed during anaphase. All centromeres of the native chromosomes and the minichromosome are positive for Centromeric Protein C, CENPC (red—color; white—greyscale) a centromere/kinetochore-specific protein. Panel B is a high magnification image of the box in A, showing the separation of the minichromosome sister chromatids (double arrow) indicating that the minichromosome, like normal chromosomes, can segregate during mitosis.

[0031] FIG. 5. FISH on a mitotic chromosomal spread of maize embryogenic calli from Hi-II transformation CMC3 pool 3 event #12. Calli were derived from immature embryos transformed with linearized BAC clone pool 3 retrofitted with Tn5-3. A tetra-aneuploid (39 chromosomes, lacking one copy of ch 6) metaphase nucleus showing the native chromosomes plus 1 minichromosome (arrow) is shown. The minichromosome is positive for the CentC (green—color; white—greyscale) centromere-specific repeat and the unique marker probe 23715 (red—color; white—greyscale) specific to the transformation construct. Panels B-D are higher magnification of the boxed area showing the minichromosome (arrowheads) and a native chromosome with: A—DAPI only; B—DAPI+CentC probe (green—color; white—greyscale); and D—DAPI+23715 probe (red—color; white—greyscale). Bipolar localization of CentC repeats as revealed by FISH staining at the minichromosome indicates that it is composed of two sister chromatids similar to that observed in the native chromosomes.

[0032] FIG. 6. FISH on a mitotic chromosomal spread of maize embryogenic calli from Hi-II transformation CMC3 pool 3 event #12. Calli were derived from immature embryos transformed with linearized BAC clone pool 3 retrofitted with Tn5-3. Panel A—Tetra-aneuploid (39 chromosomes, lacking one copy of ch 6) metaphase nucleus showing the native chromosomes plus 2 minichromosomes (arrows). Minichromosomes are positive for both the CentC (green—color; white—greyscale) centromere-specific repeat and the unique marker probe 23715 (red—color; white—greyscale) specific to the transformation construct. Panel B is a high magnification image of the 2 minichromosomes showing variation in the abundance of CentC repeats and the unique marker 23715.

[0033] FIG. 7. FISH on a mitotic chromosomal spread of maize embryogenic calli from Hi-II transformation CMC3 pool 3 event #12. Calli were derived from immature embryos transformed with linearized BAC clone pool 3 retrofitted with Tn5-3. Panel A—Tetra-aneuploid (39 chromosomes, lacking one copy of ch 6) nucleus showing separation of sister chromatids of the native chromosomes and the two minichromosomes (box) at early anaphase. The sister chromatids of both minichromosomes are positive for the CentC (green—color; white—greyscale) centromere-specific repeat and the unique marker probe 23715 (red—color; white—greyscale) specific to the transformation construct. Panels B-C are high magnification images of the 2 minichromosomes (double arrows) showing: B—DAPI+CentC probe (green—color; white—greyscale); and C—DAPI+23715 probe (red—color; white—greyscale). Separation of the minichromosome sister chromatids at anaphase suggests the presence of functional centromeres, allowing for segregation during mitosis.

[0034] FIG. 8. Immunofluorescence on a mitotic chromosomal spread of maize embryogenic calli from Hi-II transformation CMC3 pool 3 event #12. Calli were derived from immature embryos transformed with linearized BAC clone pool 3 retrofitted with Tn5-3. Panel A shows a tetra-aneuploid (39 chromosomes, lacking one copy of ch 6) metaphase nucleus showing 39 native chromosomes plus 2 minichromosomes (arrows). All centromeres of the native chromosomes and the minichromosomes are positive for Centromeric Protein C, CENPC (red—color; white—greyscale) a centromere/kinetochore-specific protein. Panels B-C are high magnification images of the minichromosomes. The pattern of CENPC immunolocalization, two foci per minichromosome, indicates that the minichromosome is composed of two sister chromatids and each has a functional centromere able to form a kinetochore complex.

[0035] FIG. 9. FISH on a mitotic chromosomal spread from root tips of a plant regenerated from a Hi-II maize transformation event. Plants were derived from immature embryos transformed with linearized bacm.pk128.j21 retrofitted with Tn5-3. Panel A shows an aneuploid metaphase nucleus showing 19 native chromosomes plus 1 minichromosome (arrow). The minichromosome is positive for the CentC (green—color; white—greyscale) centromere-specific repeat and the unique marker probe 23715 (red—color; white—greyscale) specific to the transformation construct. Panels B-D are higher magnifications of the minichromosome with: B—DAPI only; C—DAPI+CentC probe (green—color; white—greyscale); and D—DAPI+23715 probe (red—color; white—greyscale).

[0036] FIG. 10. Immunofluorescence on a mitotic chromosomal spread from root tips of a plant regenerated from a Hi-II maize transformation event. Plants were derived form immature embryos transformed with linearized bacm.pk128.j21 retrofitted with Tn5-3. Panel A shows an aneuploid metaphase nucleus showing 19 native chromosomes plus 1 minichromosome (arrow). All centromeres of the native chromosomes and the minichromosome are positive for Centromeric Protein C, CENPC (red—color; white—greyscale), a centromere/kinetochore-specific protein. Panels B-C are higher magnification of the minichromosome with: B—DAPI only; and C—DAPI+CENPC. The pattern of CENPC immunolocalization, two foci per minichromosome, indicates that the minichromosome is composed of two sister chromatids and each has a functional centromere able to form a kinetochore complex.

[0037] FIG. 11. Fine structure of corn centromeres revealed by fiber-FISH. Four centromeric repeats, CentC (green—color; white—greyscale) and a sum of CentA, CRM1, and CRM2 (red—color; grey—greyscale) were used in multi-color FISH on extended DNA fibers of oat-maize addition lines containing individual corn chromosomes. This revealed megabase-long hybridization stretches, which are unique for each chromosome.

[0038] FIG. 12. Model of a corn centromere. Centromeric organization is shown using maize centromeric repeat nomenclature. Uninterrupted arrays of CentC can be composed of several hundred to thousands of repeat elements. Other maize centromere-specific retrotransposable elements such as CentA, CRM1, and/or CRM2 can be integrated into a CentC array, into each other, and/or into itself in centromeric regions. In addition to centromere-specific retrotransposons, other retrotransposons can be integrated in the array, into elements such as CentA, CentC, CRM1, and CRM2, and/or into itself to form inserts which interrupt CentC tandem repeat arrays. This figure shows one model of the organization of maize CentC elements (arrowheads) forming two arrays of tandem head-to-tail repeats. The CentC arrays can be found in an inverted orientation to form a large segment of the centromeric DNA. Fiber-FISH along with FISH on meiotic anaphase chromosomes and blot-hybridization analysis of cloned centromeric DNA segments indicated that regions with high density of all four centromeric repeats (CentC, CRM1, CentA, and CRM2) are involved in formation of the kinetochore.

[0039] FIG. 13. Retrofitting and conversion of a BAC clone into a linear artificial minichromosome in vitro. BAC clone DNA is retrofitted with custom-made transposon Tn5-3 comprising ampicillin resistance gene (AP^{r}), origin of replication (ori), selectable (MO-PAT) and visual (DS-RED2) markers under ubiquitin promoter (UBI1ZM PRO), telomeric sequences (TEL) in reverse orientation separated by a kanamycin resistance gen (KAN^{r}) gene, and sites for homing restriction enzymes I-Ppo I, I-Ceu I, and PI-Sce I. ME stands for transposon mosaic ends. Digestion of the BAC construct with homing restriction enzyme I-Ceu I converts a circular BAC into a linear DNA molecule flanked with telomeric sequences.

[0040] FIG. 14. Metaphase nucleus of callus from CMC3 pool 1 event #14 probed for centromere and telomere elements. FISH analysis was done using fluorescently labeled probes for the centromere-specific CentC repeat (green—color; white—greyscale) and the telomere-specific telo-31 repeat (red—color; white—greyscale). Localization of these probes is noted for a native chromosome, CentC is denoted by asterisks (*), and telo-31 denoted by double arrows. Panels B-E show higher magnification of the minichromosome. Panel B—DAPI+Cent C+telo31 (green/red—color; white—greyscale); C—DAPI only; D—DAPI+CentC probe (green—color; white—greyscale); and E—DAPI+23715 probe (red—color; white—greyscale). The pattern of telo-31 hybridization suggests that the minichromosome (arrow) has functional telomeres similar to the native chromosomes.

[0041] FIG. 15. Metaphase nucleus of callus from CMC3 subpool 1.3 event #27 probed for centromere and telomere elements. FISH analysis was done using fluorescently labeled probes for the centromere-specific CentC repeat (green—color; white—greyscale) and the telomere-specific telo-31 repeat (red—color; white—greyscale). Localization of these probes is noted for a native chromosome, CentC is denoted by asterisks (*), and telo-31 denoted by double arrows. Panels B-E show higher magnification of the minichromosome. Panel B—DAPI+Cent C+telo-31 (green/red—color; white—greyscale); C—DAPI only; D—DAPI+CentC probe (green—color; white—greyscale); and E—DAPI+23715 probe (red—color; white—greyscale). The pattern of telo-31 hybridization suggests that the minichromosome (arrow) has functional telomeres similar to the native chromosomes.

### DETAILED DESCRIPTION

[0042] The disclosure of each reference set forth herein is hereby incorporated by reference in its entirety.

[0043] As used herein and in the appended claims, the singular forms “a”, “an”, and “the” include plural reference unless the context clearly dictates otherwise. Thus, for example, reference to “a plant” includes a plurality of such plants; reference to “a cell” includes one or more cells and equivalents thereof known to those skilled in the art, and so forth.

[0044] In the context of this disclosure, a number of terms and abbreviations are used. The following definitions are provided.

[0045] “Open reading frame” is abbreviated ORF.

[0046] “American Type Culture Collection” is abbreviated ATCC.

[0047] The term “artificial plant minichromosome” as used herein refers to any artificially created chromosome comprising a centromere and telomeres that possesses properties comparable to those of a native chromosome, such as replication and segregation during mitosis and meiosis and therefore autonomous and transmissible in cell division. The terms artificial minichromosome, minichromosome, and artificial chromosome are used interchangeably herein.

[0048] The term “functional centromere” refers to the spindle attachment region of a eukaryotic chromosome that functions in a manner comparable to centromeres in a native chromosome. It is the most condensed and constricted region of a chromosome, to which the spindle fiber is attached during mitosis. During mitosis in a typical plant or animal cell, each chromosome divides longitudinally into two sister chromosomes that eventually separate and travel to opposite poles of the mitotic spindle. At the beginning of mitosis, when the sister chromosomes have split but are still paired, every chromosome attaches to the spindle at a specific point along its length. That point is referred to as the centromere or spindle attachment region. Centromeres are composed of highly repetitive DNA, that is, DNA sequences that are present in a genome in many copies.

[0049] The term “array” refers to an orderly arrangement of elements.

[0050] The term “tandem repeat” refers to multiple copies of the same base sequence in the same orientation. Thus, these are copies of sequences of nucleotides, which are repeated over and over again a number of times in tandem, for example, along a chromosome. Any array of tandem repeats may comprise multiple copies of a single element, or may have at least one other element interspersed within the array, or within an element of the array.

[0051] The term “inverted orientation” refers to two or more copies of the same sequence present in an inverted form.

[0052] The terms “retrotransposable element” and “retrotransposon” are used interchangeably herein and refer to a genetic element that transposes to a new location in DNA by first making an RNA copy of itself, then making a DNA copy of this RNA with a reverse transcriptase, and then inserting the DNA copy into the target DNA. Retrotransposons are genetic elements than can amplify themselves in a genome and are ubiquitous components of the DNA of many eukaryotic organisms. They are a subclass of transposon. They are particularly abundant in plants, where they are often a principal component of nuclear DNA.

[0053] The term “functional telomere” refers to structures found at the ends of chromosomes in the cells of eukaryotes. Telomeres function by protecting chromosome ends from recombination, fusion to other chromosomes, or degradation by nucleases. They permit cells to distinguish between random DNA breaks and chromosome ends. They also play a significant role in determining the number of times that a normal cell can divide. A telomere is a region of highly repetitive DNA at the end of a linear chromosome that functions as a disposable buffer. Every time linear eukaryotic chromosomes are replicated during late S-phase the DNA polymerase complex is incapable of replicating all the way to the end of the chromosome; if it were not for telomeres, this would quickly result in the loss of vital genetic information, which is needed to sustain a cell's activities.

[0054] As used herein, “nucleic acid” means a polynucleotide and includes single or double-stranded polymer of deoxyribonucleotide or ribonucleotide bases. Nucleic acids may also include fragments and modified nucleotides. Thus, the terms “polynucleotide”, “nucleic acid sequence”, “nucleotide sequence” or “nucleic acid fragment” are used interchangeably to denote a polymer of RNA or DNA that is single or double-stranded, optionally containing synthetic, non-natural or altered nucleotide bases. Nucleotides (usually found in their 5′-monophosphate form) are referred to by their single letter designation as follows: “A” for adenosine or deoxyadenosine (for RNA or DNA, respectively), “C” for cytosine or deoxycytosine, “G” for guanosine or deoxyguanosine, “U” for uridine, “T” for deoxythymidine, “R” for purines (A or G), “Y” for pyrimidines (C or T), “K” for G or T, “H” for A or C or T, “I” for inosine, and “N” for any nucleotide.

[0055] The terms “subfragment that is functionally equivalent” and “functionally equivalent subfragment” are used interchangeably herein. These terms refer to a portion or subsequence of an isolated nucleic acid fragment in which the ability to alter gene expression or produce a certain phenotype is retained whether or not the fragment or subfragment encodes an active enzyme. For example, the fragment or subfragment can be used in the design of chimeric genes to produce the desired phenotype in a transformed plant. Chimeric genes can be designed for use in suppression by linking a nucleic acid fragment or subfragment thereof, whether or not it encodes an active enzyme, in the sense or antisense orientation relative to a plant promoter sequence.

[0056] The term “conserved domain” or “motif” means a set of amino acids conserved at specific positions along an aligned sequence of evolutionarily related proteins. While amino acids at other positions can vary between homologous proteins, amino acids that are highly conserved at specific positions indicate amino acids that are essential in the structure, the stability, or the activity of a protein. Because they are identified by their high degree of conservation in aligned sequences of a family of protein homologues, they can be used as identifiers, or “signatures”, to determine if a protein with a newly determined sequence belongs to a previously identified protein family.

[0057] The terms “homology”, “homologous”, “substantially similar”, “substantially identical”, and “corresponding substantially” are used interchangeably herein. They refer to nucleic acid fragments wherein changes in one or more nucleotide bases do not affect the ability of the nucleic acid fragment to mediate gene expression or produce a certain phenotype. These terms also refer to modifications of the nucleic acid fragments of the instant invention such as deletion or insertion of one or more nucleotides that do not substantially alter the functional properties of the resulting nucleic acid fragment relative to the initial, unmodified fragment. These terms also refer to amino acid sequences, polypeptides, or peptide fragments with or without modifications, deletions, insertions, or substitutions that do not substantially alter the functional properties relative to an initial unmodified sequence. It is therefore understood, as those skilled in the art will appreciate, that the invention encompasses more than the specific exemplary sequences.

[0058] Moreover, the skilled artisan recognizes that substantially similar nucleic acid sequences encompassed by this invention are also defined by their ability to hybridize (under moderately stringent conditions, e.g., 0.5×SSC, 0.1% SDS, 60° C.) with the sequences exemplified herein, or to any portion of the nucleotide sequences disclosed herein and which are functionally equivalent to any of the nucleic acid sequences disclosed herein. Stringency conditions can be adjusted to screen for moderately similar fragments, such as homologous sequences from distantly related organisms, to highly similar fragments, such as genes that duplicate functional enzymes from closely related organisms. Post-hybridization washes determine stringency conditions.

[0059] The term “selectively hybridizes” includes reference to hybridization, under stringent hybridization conditions, of a nucleic acid sequence to a specified nucleic acid target sequence to a detectably greater degree (e.g., at least 2-fold over background) than its hybridization to non-target nucleic acid sequences and to the substantial exclusion of non-target nucleic acids. Selectively hybridizing sequences typically have about at least 80% sequence identity, or 90% sequence identity, up to and including 100% sequence identity (i.e., fully complementary) with each other.

[0060] The term “stringent conditions” or “stringent hybridization conditions” includes reference to conditions under which a probe will selectively hybridize to its target sequence. Stringent conditions are sequence-dependent and will be different in different circumstances. By controlling the stringency of the hybridization and/or washing conditions, target sequences can be identified which are 100% complementary to the probe (homologous probing). Alternatively, stringency conditions can be adjusted to allow some mismatching in sequences so that lower degrees of similarity are detected (heterologous probing). Generally, a probe is less than about 1000 nucleotides in length, optionally less than 500 nucleotides in length.

[0061] Typically, stringent conditions will be those in which the salt concentration is less than about 1.5 M Na ion, typically about 0.01 to 1.0 M Na ion concentration (or other salts) at pH 7.0 to 8.3 and the temperature is at least about 30° C. for short probes (e.g., 10 to 50 nucleotides) and at least about 60° C. for long probes (e.g., greater than 50 nucleotides). Stringent conditions may also be achieved with the addition of destabilizing agents such as formamide. Exemplary low stringency conditions include hybridization with a buffer solution of 30 to 35% formamide, 1 M NaCl, 1% SDS (sodium dodecyl sulphate) at 37° C., and a wash in 1× to 2×SSC (20×SSC=3.0 M NaCl/0.3 M trisodium citrate) at 50 to 55° C. Exemplary moderate stringency conditions include hybridization in 40 to 45% formamide, 1 M NaCl, 1% SDS at 37° C., and a wash in 0.5× to 1×SSC at 55 to 60° C. Exemplary high stringency conditions include hybridization in 50% formamide, 1 M NaCl, 1% SDS at 37° C., and a wash in 0.1×SSC at 60 to 65° C.

[0062] Specificity is typically the function of post-hybridization washes, the critical factors being the ionic strength and temperature of the final wash solution. For DNA-DNA hybrids, the Tₘ can be approximated from the equation of Meinkoth, et al. ((1984) Anal Biochem 138:267-284): Tₘ=81.5° C.+16.6 (log M)+0.41 (% GC)−0.61 (% form)−500/L; where M is the molarity of monovalent cations, % GC is the percentage of guanosine and cytosine nucleotides in the DNA, % form is the percentage of formamide in the hybridization solution, and L is the length of the hybrid in base pairs. The Tₘ is the temperature (under defined ionic strength and pH) at which 50% of a complementary target sequence hybridizes to a perfectly matched probe. Tₘ is reduced by about 1° C. for each 1% of mismatching; thus, Tₘ, hybridization and/or wash conditions can be adjusted to hybridize to sequences of the desired identity. For example, if sequences with ≧90% identity are sought, the Tₘ can be decreased 10° C. Generally, stringent conditions are selected to be about 5° C. lower than the thermal melting point (Tₘ) for the specific sequence and its complement at a defined ionic strength and pH. However, severely stringent conditions can utilize a hybridization and/or wash at 1, 2, 3 or 4° C. lower than the thermal melting point (Tₘ); moderately stringent conditions can utilize a hybridization and/or wash at 6, 7, 8, 9 or 10° C. lower than the thermal melting point (Tₘ); low stringency conditions can utilize a hybridization and/or wash at 11, 12, 13, 14, 15 or 20° C. lower than the thermal melting point (Tₘ). Using the equation, hybridization and wash compositions, and desired Tₘ, those of ordinary skill will understand that variations in the stringency of hybridization and/or wash solutions are inherently described. If the desired degree of mismatching results in a Tₘ of less than 45° C. (aqueous solution) or 32° C. (formamide solution) it is preferred to increase the SSC concentration so that a higher temperature can be used. An extensive guide to the hybridization of nucleic acids is found in Tijssen, Laboratory Techniques in Biochemistry and Molecular Biology—Hybridization with Nucleic Acid Probes, Part I, Chapter 2 “Overview of principles of hybridization and the strategy of nucleic acid probe assays”, Elsevier, New York (1993); and Current Protocols in Molecular Biology, Chapter 2, Ausubel et al., Eds., Greene Publishing and Wiley-Interscience, New York (1995). Hybridization and/or wash conditions can be applied for at least 10, 30, 60, 90, 120 or 240 minutes.

[0063] The term “sequence identity” or “identity” in the context of nucleic acid or polypeptide sequences refers to the nucleic acid bases or amino acid residues in two sequences that are the same when aligned for maximum correspondence over a specified comparison window. The term “percentage of sequence identity” refers to the value determined by comparing two optimally aligned sequences over a comparison window, wherein the portion of the polynucleotide or polypeptide sequence in the comparison window may comprise additions or deletions (i.e., gaps) as compared to the reference sequence (which does not comprise additions or deletions) for optimal alignment of the two sequences. The percentage is calculated by determining the number of positions at which the identical nucleic acid base or amino acid residue occurs in both sequences to yield the number of matched positions, dividing the number of matched positions by the total number of positions in the window of comparison and multiplying the results by 100 to yield the percentage of sequence identity. Useful examples of percent sequence identities include, but are not limited to, 50%, 55%, 60%, 65%, 70%, 75%, 80%, 85%, 90% or 95%, or any integer percentage from 50% to 100%. These identities can be determined using any of the programs described herein.

[0064] Sequence alignments and percent identity or similarity calculations may be determined using a variety of comparison methods designed to detect homologous sequences including, but not limited to, the MegAlign™ program of the LASERGENE bioinformatics computing suite (DNASTAR Inc., Madison, Wis.). Within the context of this application it will be understood that where sequence analysis software is used for analysis, that the results of the analysis will be based on the “default values” of the program referenced, unless otherwise specified. As used herein “default values” will mean any set of values or parameters that originally load with the software when first initialized. The term “Clustal V method of alignment” corresponds to the alignment method labeled Clustal V (described by Higgins and Sharp, (1989) CABIOS 5:151-153; Higgins et al. (1992) Comput Appl Biosci 8:189-191) and found in the MegAlign™ program of the LASERGENE bioinformatics computing suite (DNASTAR Inc., Madison, Wis.). For multiple alignments, the default values correspond to GAP PENALTY=10 and GAP LENGTH PENALTY=10. Default parameters for pairwise alignments and calculation of percent identity of protein sequences using the Clustal method are KTUPLE=1, GAP PENALTY=3, WINDOW=5 and DIAGONALS SAVED=5. For nucleic acids these parameters are KTUPLE=2, GAP PENALTY=5, WINDOW=4 and DIAGONALS SAVED=4. After alignment of the sequences using the Clustal V program, it is possible to obtain a “percent identity” by viewing the “sequence distances” table in the same program. The term “Clustal W method of alignment” corresponds to the alignment method labeled Clustal W (described by Higgins and Sharp, (1989) CABIOS 5:151-153; Higgins et al. (1992) Comput Appl Biosci 8:189-191) and found in the MegAlign™ v6.1 program of the LASERGENE bioinformatics computing suite (DNASTAR Inc., Madison, Wis.). Default parameters for multiple alignment are GAP PENALTY=10, GAP LENGTH PENALTY=0.2, Delay Divergen Seqs (%)=30, DNA Transition Weight=0.5, Protein Weight Matrix=Gonnet Series, DNA Weight Matrix=IUB. After alignment of the sequences using the Clustal W program, it is possible to obtain a “percent identity” by viewing the “sequence distances” table in the same program. The term “BLASTN method of alignment” is an algorithm provided by the National Center for Biotechnology Information (NCBI) to compare nucleotide sequences using default parameters.

[0065] It is well understood by one skilled in the art that many levels of sequence identity are useful in identifying polypeptides, from other species, wherein such polypeptides have the same or similar function or activity. Useful examples of percent identities include, but are not limited to, 50%, 55%, 60%, 65%, 70%, 75%, 80%, 85%, 90% or 95%, or any integer percentage from 50% to 100%. Indeed, any integer amino acid identity from 50% to 100% may be useful in describing the present invention, such as 51%, 52%, 53%, 54%, 55%, 56%, 57%, 58%, 59%, 60%, 61%, 62%, 63%, 64%, 65%, 66%, 67%, 68%, 69%, 70%, 71%, 72%, 73%, 74%, 75%, 76%, 77%, 78%, 79%, 80%, 81%, 82%, 83%, 84%, 85%, 86%, 87%, 88%, 89%, 90%, 91%, 92%, 93%, 94%, 95%, 96%, 97%, 98% or 99%.

[0066] The term “gene” refers to a nucleic acid fragment that expresses a specific protein, including regulatory sequences preceding (5′ non-coding sequences) and following (3′ non-coding sequences) the coding sequence. “Native gene” refers to a gene as found in nature with its own regulatory sequences. “Chimeric gene” refers to any gene that is not a native gene, comprising regulatory and coding sequences that are not found together in nature. Accordingly, a chimeric gene may comprise regulatory sequences and coding sequences that are derived from different sources, or regulatory sequences and coding sequences derived from the same source, but arranged in a manner different than that found in nature. A “foreign” gene refers to a gene not normally found in the host organism, but that is introduced into the host organism by gene transfer. Foreign genes can comprise native genes inserted into a non-native organism, or chimeric genes. A “transgene” is a gene that has been introduced into the genome by a transformation procedure.

[0067] The term “genome” as it applies to a plant cells encompasses not only chromosomal DNA found within the nucleus, but organelle DNA found within subcellular components (e.g., mitochondria, or plastid) of the cell.

[0068] A “codon-optimized gene” or “codon-preferred gene” is a gene having its frequency of codon usage designed to mimic the frequency of preferred codon usage of the host cell.

[0069] An “allele” is one of several alternative forms of a gene occupying a given locus on a chromosome. When all the alleles present at a given locus on a chromosome are the same that plant is homozygous at that locus. If the alleles present at a given locus on a chromosome differ that plant is heterozygous at that locus.

[0070] The term “coding sequence” refers to a polynucleotide sequence that codes for a specific amino acid sequence. “Regulatory sequences” refer to nucleotide sequences located upstream (5′ non-coding sequences), within, or downstream (3′ non-coding sequences) of a coding sequence, and which influence the transcription, RNA processing or stability, or translation of the associated coding sequence. Regulatory sequences may include, but are not limited to: promoters, translation leader sequences, introns, polyadenylation recognition sequences, RNA processing sites, effector binding sites and stem-loop structures.

[0071] The term “promoter” refers to a DNA sequence capable of controlling the expression of a coding sequence or functional RNA. The promoter sequence consists of proximal and more distal upstream elements, the latter elements often referred to as enhancers. Accordingly, an “enhancer” is a DNA sequence that can stimulate promoter activity, and may be an innate element of the promoter or a heterologous element inserted to enhance the level or tissue-specificity of a promoter. Promoters may be derived in their entirety from a native gene, or be composed of different elements derived from different promoters found in nature, or even comprise synthetic DNA segments. It is understood by those skilled in the art that different promoters may direct the expression of a gene in different tissues or cell types, or at different stages of development, or in response to different environmental conditions. It is further recognized that since in most cases the exact boundaries of regulatory sequences have not been completely defined, DNA fragments of some variation may have identical promoter activity. Promoters that cause a gene to be expressed in most cell types at most times are commonly referred to as “constitutive promoters”. New promoters of various types useful in plant cells are constantly being discovered; numerous examples may be found in the compilation by Okamuro and Goldberg (1989) Biochemistry of Plants 15:1-82.

[0072] The term “translation leader sequence” refers to a polynucleotide sequence located between the promoter sequence of a gene and the coding sequence. The translation leader sequence is present in the fully processed mRNA upstream of the translation start sequence.

[0073] The translation leader sequence may affect processing of the primary transcript to mRNA, mRNA stability or translation efficiency. Examples of translation leader sequences have been described (Turner and Foster (1995) Mol Biotechnol 3:225-236).

[0074] The terms “3′ non-coding sequences”, “transcription terminator” or “termination sequences” refer to DNA sequences located downstream of a coding sequence and include polyadenylation recognition sequences and other sequences encoding regulatory signals capable of affecting mRNA processing or gene expression. The polyadenylation signal is usually characterized by affecting the addition of polyadenylic acid tracts to the 3′ end of the mRNA precursor. The use of different 3′ non-coding sequences is exemplified by Ingelbrecht et al. (1989) Plant Cell 1:671-680.

[0075] The term “RNA transcript” refers to the product resulting from RNA polymerase-catalyzed transcription of a DNA sequence. When the RNA transcript is a perfect complementary copy of the DNA sequence, it is referred to as the primary transcript. A RNA transcript is referred to as the mature RNA when it is a RNA sequence derived from post-transcriptional processing of the primary transcript. “Messenger RNA” or “mRNA” refers to the RNA that is without introns and that can be translated into protein by the cell. “cDNA” refers to a DNA that is complementary to, and synthesized from, a mRNA template using the enzyme reverse transcriptase. The cDNA can be single-stranded or converted into double-stranded form using the Klenow fragment of DNA polymerase I. “Sense” RNA refers to RNA transcript that includes the mRNA and can be translated into protein within a cell or in vitro. “Antisense RNA” refers to an RNA transcript that is complementary to all or part of a target primary transcript or mRNA, and that blocks the expression of a target gene (U.S. Pat. No. 5,107,065). The complementarity of an antisense RNA may be with any part of the specific gene transcript, i.e., at the 5′ non-coding sequence, 3′ non-coding sequence, introns, or the coding sequence. “Functional RNA” refers to antisense RNA, ribozyme RNA, or other RNA that may not be translated but yet has an effect on cellular processes. The terms “complement” and “reverse complement” are used interchangeably herein with respect to mRNA transcripts, and are meant to define the antisense RNA of the message.

[0076] The term “operably linked” refers to the association of nucleic acid sequences on a single nucleic acid fragment so that the function of one is regulated by the other. For example, a promoter is operably linked with a coding sequence when it is capable of regulating the expression of that coding sequence (i.e., the coding sequence is under the transcriptional control of the promoter). Coding sequences can be operably linked to regulatory sequences in a sense or antisense orientation. In another example, the complementary RNA regions of the invention can be operably linked, either directly or indirectly, 5′ to the target mRNA, or 3′ to the target mRNA, or within the target mRNA, or a first complementary region is 5′ and its complement is 3′ to the target mRNA.

[0077] Standard recombinant DNA and molecular cloning techniques used herein are well known in the art and are described more fully in Sambrook et al., Molecular Cloning: A Laboratory Manual; Cold Spring Harbor Laboratory: Cold Spring Harbor, N.Y. (1989). Transformation methods are well known to those skilled in the art and are described infra.

[0078] “PCR” or “polymerase chain reaction” is a technique for the synthesis of specific DNA segments and consists of a series of repetitive denaturation, annealing, and extension cycles. Typically, a double-stranded DNA is heat denatured, the two primers complementary to the 3′ boundaries of the target segment are annealed at low temperature, and then extended at an intermediate temperature. One set of these three consecutive steps is referred to as a “cycle”.

[0079] The term “recombinant” refers to an artificial combination of two otherwise separated segments of sequence, e.g., by chemical synthesis or by the manipulation of isolated segments of nucleic acids by genetic engineering techniques.

[0080] The terms “plasmid”, “vector” and “cassette” refer to an extra chromosomal element often carrying genes that are not part of the central metabolism of the cell, and usually in the form of circular double-stranded DNA fragments. Such elements may be autonomously replicating sequences, genome integrating sequences, phage or nucleotide sequences, linear or circular, of a single- or double-stranded DNA or RNA, derived from any source, in which a number of nucleotide sequences have been joined or recombined into a unique construction which is capable of introducing a promoter fragment and DNA sequence for a selected gene product along with appropriate 3′ untranslated sequence into a cell. “Transformation cassette” refers to a specific vector containing a foreign gene and having elements in addition to the foreign gene that facilitate transformation of a particular host cell. “Expression cassette” refers to a specific vector containing a foreign gene and having elements in addition to the foreign gene that allow for expression of that gene in a foreign host.

[0081] The terms “recombinant construct”, “expression construct”, “chimeric construct”, “construct”, and “recombinant DNA construct” are used interchangeably herein. A recombinant construct comprises an artificial combination of nucleic acid fragments, e.g., regulatory and coding sequences that are not found together in nature. For example, a chimeric construct may comprise regulatory sequences and coding sequences that are derived from different sources, or regulatory sequences and coding sequences derived from the same source, but arranged in a manner different than that found in nature. Such a construct may be used by itself or may be used in conjunction with a vector. If a vector is used, then the choice of vector is dependent upon the method that will be used to transform host cells as is well known to those skilled in the art. For example, a plasmid vector can be used. The skilled artisan is well aware of the genetic elements that must be present on the vector in order to successfully transform, select and propagate host cells comprising any of the isolated nucleic acid fragments of the invention. The skilled artisan will also recognize that different independent transformation events may result in different levels and patterns of expression (Jones et al. (1985) EMBO J. 4:2411-2418; De Almeida et al. (1989) Mol Gen Genet. 218:78-86), and thus that multiple events must be screened in order to obtain lines displaying the desired expression level and pattern. Such screening may be accomplished by Southern analysis of DNA, Northern analysis of mRNA expression, immunoblotting analysis of protein expression, or phenotypic analysis, among others.

[0082] The term “expression”, as used herein, refers to the production of a functional end-product (e.g., an mRNA or a protein, in either precursor or mature form).

[0083] The term “introduced” means providing a nucleic acid (e.g., expression construct) or protein into a cell. Introduced includes reference to the incorporation of a nucleic acid into a eukaryotic or prokaryotic cell where the nucleic acid may be incorporated into the genome of the cell, and includes reference to the transient provision of a nucleic acid or protein to the cell. Introduced includes reference to stable or transient transformation methods, as well as sexually crossing. Thus, “introduced” in the context of inserting a nucleic acid fragment (e.g., a recombinant DNA construct/expression construct) into a cell, means “transfection” or “transformation” or “transduction” and includes reference to the incorporation of a nucleic acid fragment into a eukaryotic or prokaryotic cell where the nucleic acid fragment may be incorporated into the genome of the cell (e.g., chromosome, plasmid, plastid or mitochondrial DNA), converted into an autonomous replicon, or transiently expressed (e.g., transfected mRNA).

[0084] The term “mature” protein refers to a post-translationally processed polypeptide (i.e., one from which any pre- or propeptides present in the primary translation product have been removed). “Precursor” protein refers to the primary product of translation of mRNA (i.e., with pre- and propeptides still present). Pre- and propeptides may be, but are not limited to, intracellular localization signals.

[0085] The term “stable transformation” refers to the transfer of a nucleic acid fragment into a genome of a host organism, including both nuclear and organellar genomes, resulting in genetically stable inheritance. In contrast, “transient transformation” refers to the transfer of a nucleic acid fragment into the nucleus, or DNA-containing organelle, of a host organism resulting in gene expression without integration or stable inheritance. Host organisms containing the transformed nucleic acid fragments are referred to as “transgenic” organisms.

[0086] The term “transgenic” refers to a plant or a cell, which comprises within its genome a heterologous polynucleotide. Preferably, the heterologous polynucleotide is stably integrated within the genome such that the polynucleotide is passed on to successive generations. The heterologous polynucleotide may be integrated into the genome alone or as part of an expression construct. Transgenic is used herein to include any cell, cell line, callus, tissue, plant part or plant, the genotype of which has been altered by the presence of heterologous nucleic acid including those transgenics initially so altered as well as those created by sexual crosses or asexual propagation from the initial transgenic. The term “transgenic” as used herein does not encompass the alteration of the genome (chromosomal or extra-chromosomal) by conventional plant breeding methods or by naturally occurring events such as random cross-fertilization, non-recombinant viral infection, non-recombinant bacterial transformation, non-recombinant transposition, or spontaneous mutation.

[0087] The term “plant” refers to whole plants, plant organs, plant tissues, seeds, plant cells, seeds and progeny of the same. Plant cells include, without limitation, cells from seeds, suspension cultures, embryos, meristematic regions, callus tissue, leaves, roots, shoots, gametophytes, sporophytes, pollen and microspores. Plant parts include differentiated and undifferentiated tissues including, but not limited to the following: roots, stems, shoots, leaves, pollen, seeds, tumor tissue and various forms of cells and culture (e.g., single cells, protoplasts, embryos and callus tissue). The plant tissue may be in plant or in a plant organ, tissue or cell culture. The term “plant organ” refers to plant tissue or a group of tissues that constitute a morphologically and functionally distinct part of a plant. The term “genome” refers to the following: (1) the entire complement of genetic material (genes and non-coding sequences) that is present in each cell of an organism, or virus or organelle; and/or (2) a complete set of chromosomes inherited as a (haploid) unit from one parent. “Progeny” comprises any subsequent generation of a plant.

[0088] The instant invention concerns an artificial plant minichromosome comprising a functional centromere containing: (a) at least two arrays of tandem repeats of CentC in an inverted orientation wherein the first array comprises at least fifty copies of CentC and the second array comprises at least fifty copies of CentC; and, (b) at least one copy of a retrotransposable element, wherein the retrotransposable element is situated between the first and the second array. Preferably, the retrotransposable element is selected from the group consisting of CentA, CRM1, and CRM2.

[0089] The artificial chromosome comprises a functional centromere having arrays of tandem repeats of CentC. Each array of CentC repeats may comprise at least 30, 40, 50, 60, 70, 80, 90, 100, 120, 140, 150, 160, 180, 200, 220, 240, 250, 260, 280, 300, 320, 340, 360, 380, 400, 450 or 500 copies of CentC. Further, each array of tandem repeats of CentC may be interrupted by another sequence element, including but not limited to a retrotransposon, which is inserted between copies of CentC, or within a CentC element, or within a retrotransposon, or any other sequence element in the array. Retrotransposons include, but are not limited to, CentA, CRM1, CRM2.

[0090] In most eukaryotes the centromere, which is the site for kinetochore formation and spindle attachment in chromosomes, is embedded in heterochromatin. S. cerevisiae chromosomes lack satellite sequences and have small, precisely localized centromeres which specify spindle attachment with ˜125 bp of DNA (Blackburn and Szostak (1984) Ann Rev Biochem 53:163-194).

[0091] However, centromeres from other fungal lineages include arrays of repeats more similar to those found animals and plants (Fishel et al. (1988) Mol Cell Biol 8:754-763). In higher eukaryotes, cytological and biochemical studies demonstrated a physical association between tandemly repeated satellite DNAs, centromere regions, and specific centromere associated proteins (Henikoff et al. (2001) Science 293:1098-1102; Yu and Dawe (2000) J Cell Biol 151:131-142).

[0092] Despite the lack of universal sequence motifs, most centromeric satellite repeats have remarkably similar unit length between organisms, for example the basic satellite unit is 171 bp in primates, 186 bp in the fish Sparus aurata, and 155 bp in the insect Chironomus pallidivittatus (Henikoff et al. (2001) Science 293:1098-1102).

[0093] Plant centromeres possess similar unit length repeats, for example, 156 bp repeat in maize (Ananiev et al. (1998) Proc Natl Acad Sci USA 95:13073-13078), 168 bp repeat in rice (Dong et al. (1998) Proc Natl Acad Sci USA 95:8135-8140), and 180 bp repeat in Arabidopsis (Copenhaver (2003) Chromosome Res 11:255-262). In Arabidopsis, centromeres typically contain 2.8-4 Mb tracts of tandemly repeated 178 bp satellite sequences (Hall et al. (2004) Curr Opin Plant Biol 7:108-114). In maize, a fully functional supernumerary B chromosome centromere contains about 500 kb of tandem repeats, wherein partial deletions reduce transmission (Alfenito and Birchler (1993) Genetics 135:589-597). Maize chromosome spreads containing the supernumerary B chromosome were hybridized with probes from various repetitive elements including CentC, CRM, and CentA, which localized to centromeric regions on the A chromosomes. These repetitive elements, predominantly found near A chromosome centromeres, hybridized to many sites distinct from the centromere on the B chromosome (Lamb et al. (2005) Chromosoma 113:337-349).

[0094] At least two examples deviate from the general rule of centromere formation on the basis of centromeric satellite DNA. First, the apparently normal functioning of alien centromeres in somatic hybrids or in oat-maize introgression lines (Ananiev et al. (1998) Proc Natl Acad Sci USA 95:13073-13078) is indicative of conservation of centromere function and corresponding protein complexes. All centromeric proteins to support the function of an alien centromere comprising unrelated centromeric satellite DNA are apparently provided by the host (Jin et al. (2004) Plant Cell 16:571-81). Second, neocentromeres are a novel class of non-repeat DNA-based centromeres recently described in humans and Drosophila (Williams (1998) Nat Genet. 18:30-37; Choo (1997) Am J Hum Genet. 61:1225-1233). Found as derivatives of normal chromosomes resulting from multiple chromosomal rearrangements, neocentromeres are formed at apparently euchromatic DNA regions devoid of the repeats typically associated with centromere function. Chromosomes with neocentromeres have variable mitotic or meiotic stability.

[0095] The nature and functioning of the centromere is not yet completely understood and requires additional analysis. To date, most artificial chromosomes have functional centromeres based on native centromeric satellite DNAs. It is possible that knob repeats, such as 180 bp and 350 bp (TRI), may be used as a component of a neocentromere. It was shown that some knobs could acquire centromere function in meiotic maize chromosomes, these neocentromeres comprised 180 bp and 350 bp tandem repeats only. The study of neocentromeres in humans and lower organisms, has unraveled a previously unsuspected phenomenon depicting the dynamic nature of centromeric DNA (Choo et al. (1997) Am J Hum Genet. 61:1225-33). At the core of this phenomenon, there appears to be no specific DNA sequence requirement for centromere function; rather, a variety of sequences that can respond to the appropriate epigenetic influence appear to provide this function.

[0096] Extensive characterizations of centromere sequences have come from studies in yeast, for example S. cerevisaie and S. pombe, and have defined functional yeast centromere elements and organization. For example, in S. cerevisaie centromeres the structure and function of three essential regions, CDEI, CDEII, and CDEIII, totaling only 125 bp, or 0.006-0.06% of each chromosome were described (Carbon et al. (1990) New Biologist 2:10-19; Bloom (1993) Cell 73:621-624).

[0097] S. pombe centromeres are between 40-100 kb and consist of repetitive elements that comprise 1-3% of each chromosome (Baum et al., (1994) Mol Cell Biol 5:747-761). Subsequent studies demonstrated that less than ⅓ of the native S. pombe centromere is sufficient for centromere function (Baum et al. (1994) Mol Cell Biol 5:747-761). In S. pombe, it was shown that an inverted repeat region was essential for centromeric function, but neither the central core nor one arm of the inverted repeat alone conferred function. Deletion of a portion of the repeated sequences that flank the central core had no effect on mitotic segregation functions, or on meiotic segregation of a minichromosome to haploid progeny, but drastically impaired centromere-mediated maintenance of sister chromatid pairing of homologues in meiosis 1. There is significant variability between each of the three different chromosomes in S. pombe, and the centromere of any particular chromosome can contain significant variability across different strains of S. pombe. However, the basic DNA structural motif, namely, the inverted repeats, is a common parameter of the S. pombe centromere (Clarke et al. (1993) Cold Spring Harb Symp Quant Biol 58:687-695).

[0098] Centromeres from higher eukaryotes are less characterized. DNA fragments that hybridize to centromeric regions in higher eukaryotes have been identified, however generally little is known about the structure, organization, and/or functionality of these sequences. However, rice is an exception because of its different centromere size. Though some rice chromosomes have a centromere similar in size to those in other species (>1 Mb), the centromeres of several chromosomes are surprisingly small and can be fully covered by BAC contigs constructed using standard techniques. Complete sequencing of rice centromere 4 and 8 revealed the presence of inverted blocks of centromeric tandem repeats within the chromosomal segment considered the centromere, similar to the inverted repeat structure observed in yeast (Zhang et al. (2004) Nucl Acids Res 32:2023-2030; Wu et al. (2004) Plant Cell 16:967-976).

[0099] In many cases probes to centromere repeats correlate with centromere location both cytologically and genetically, with many of these sequences present as tandemly-repeated satellite elements and dispersed repeated sequences in arrays ranging from 300-5000 kb in length (Willard (1990) Trends Genet. 6:410-416). In situ hybridization has shown the alphoid satellite 171 bp repeat to be present in each human centromere (Tyler-Smith et al. (1993) Curr Biol 390-397). Whether these repeats constitute functional centromeres is not yet determined, and it appears other genomic DNA is needed to confer heritability to the DNA. Transfection of cell lines with alphoid satellites produced new chromosomes, however these new chromosomes also contain host DNA, which could contribute to centromere activity (Haaf et al. (1992) Cell 70:681-696; Willard (1997) Nat Genet. 15:345-354). Further, the new chromosomes can show alphoid DNA spread over their entire length yet have only one centromeric constriction, indicating that a block of alphoid DNA may be insufficient to confer centromere function.

[0100] Genetic characterization of centromeres from plants has used segregation analysis of chromosome fragments, including analysis of trisomic strains carrying a genetically marked telocentric fragment (e.g., Koornneef (1983) Genetica 62:33-40). Plant centromere repetitive elements which are genetically (Richards et al. (1991) Nucl Acids Res 19:3351-3357) or physically (Alfenito et al. (1993) Genetics 135:589-597; Maluszynska et al. (1991) Plant J 1:159-166) linked to a centromere have been identified, however the importance of these sequences regarding centromere function has not been fully functionally characterized.

[0101] Cytological studies in Arabidopsis thaliana have correlated centromere structure with repeat sequences. Staining with a non-specific fluorescent DNA-binding agent, such as 4′,6-diamidino-2-phenylindole (DAPI), allows visualization of centromeric chromatin domains in metaphase chromosomes. A fluorescent in situ hybridization (FISH) probe to 180 bp pALI repeat sequences colocalized with the DAPI signature near the centromeres of all five Arabidopsis chromosomes (Maluszynska et al. (1991) Plant J 1:159-166; Martinez-Zapater et al., (1986) Mol Gen Genet. 204:417-423). A functional role for pALI was proposed, however more recent studies have not detected this sequence near the centromeres of species closely related to Arabidopsis (Maluszynska et al. (1993) Ann Botany 71:479-484). One species tested, A. pumila is believed to be an amphidiploid derived from a cross of A. thaliana with another close relative (Maluszynska et al. (1991) Plant J 1:159-166; Price et al. (1995) in Arabidopsis, Somerville and Meyerowitz (eds) Cold Spring Harbor Press, NY). Another repetitive sequence, pAt12, genetically maps to within 5 cM of the centromere of chromosome 1, and the central region of chromosome 5 (Richards et al. (1991) Nucl Acids Res 19:3351-3357), but its role in centromere function remains to be established.

[0102] Plant centromere regions are composed predominantly of centromere-specific repeats, centromeric retrotransposons, and a few other repetitive elements which are mostly scattered along the plant genome. For example centromeric repeats such as CentO and CRR are known from rice. Four centromere repetitive elements have been described in maize: CentA, CentC, CRM1, and CRM2 (SEQ ID NOS: 1-4). In maize, the first tandem repeated centromere-specific element discovered was CentC (Ananiev et al. (1998) Proc Natl Acad Sci USA 95:13073-13078). CentC forms multiple tandem arrays of varying length, with some tandem arrays comprising up to one thousand copies of the CentC repeat. The CentC tandem repeat interacts with CENH3 protein in the centromeric nucleosome.

[0103] Maize centromere-specific element, CentA, appears to be a retrotransposon based on its structure and properties (Ananiev et al. (1998) Proc Natl Acad Sci USA 95:13073-13078; GenBank AF078917). Another highly conservative centromere-specific retrotransposon of maize, CRM2, was found in 2003 (Nagaki et al. (2003) Genetics 163:759-770; GenBank AY129008). A fourth centromere-specific retrotransposon, CRM1 (SEQ ID NO: 3), was identified by comparative analysis of published DNA sequences of two maize centromeric BAC clones (Nagaki et al. (2003) Genetics 163:759-770) and proprietary maize genomic DNA sequences (Ananiev (2005) unpublished). Some homology can be detected among the centromeric repeat elements from closely related species, such as sorghum and sugarcane (Miller et al. (1998) Genetics 150:1615-1623; Nagaki et al. (1998) Chromosome Res 6:295-302; Zwick et al. (2000) Am J Bot 87:1757-1764); and maize and rice (Ananiev et al. (1998) Proc Natl Acad Sci USA 95:13073-13078); Cheng et al. (2002) Plant Cell 14:1691-1704).

[0104] In addition, plant centromeres contain abundant retrotransposons (CR), in cereals many of the CR elements fall within a highly conserved phylogenetic clade of Ty3/gypsy elements (Miller et al. (1998) Theor Appl Genet. 96:832-839; Presting et al. (1998) Plant J 16:721-728; Langdon et al. (2000) Genetics 156:313-325). The DNA homology is sufficient that CR probes from sorghum or Brachypodium sylvaticum identify the centromeres in most or all of the chromosomes in agronomically significant cereals such as rice, maize, wheat, sorghum, barley, and rye (Aragon-Alcaide et al. (1996) Chromosoma 105:261-268; Jiang et al. (1996) Proc Natl Acad Sci USA 93:14210-14213; Miller et al. (1998) Theor Appl Genet. 96:832-839).

[0105] Retrotransposons, also known as class I transposable elements, consist of two subtypes, the long terminal repeat (LTR) and the non-LTR retrotransposons. The long terminal repeat subtypes have direct LTRs that range from ˜100 bp to over 5 kb in size. LTR retrotransposons are further classified into the Ty1-copia-like (Pseudoviridae) and the Ty3-gypsy-like (Metaviridae) groups based on both their degree of sequence similarity and the order of encoded gene products. Ty1-copia and Ty3-gypsy groups of retrotransposons are commonly found in high copy number (up to a few million copies per haploid nucleus) in plants with large genomes. Ty1-copia retrotransposons are abundant in species ranging from single-cell algae to bryophytes, gymnosperms, and angiosperms. Ty3-gypsy retrotransposons are also widely distributed, including both gymnosperms and angiosperms. LTR retrotransposons make up approximately 8% of the human genome. Non-LTR retrotransposons consist of two subtypes, long interspersed nuclear elements (LINEs) and short interspersed nuclear elements (SINEs). They also can be found in high copy numbers (up to 250,000) in plant species. Plant transposons, including retrotransposons, are reviewed by Feschotte et al. (2002) Nat Rev Genet. 3:329-341. Plant retrotransposons are reviewed by Kumar and Bennetzen (1999) Ann Rev Genet. 33:479-532.

[0106] Centromeric retrotransposons are identifiable based on unified classification of reverse-transcribing elements used for phylogeny and taxonomy studies. Complete retroelements and retroviruses include two or more open reading frames (ORFs) that encode single proteins or polyproteins. The order of the genes in the elements varies, but are classified on the basis of amino acid alignments and key conserved residues or domains within the reverse transcriptase (RT), RNase H 15 (RH), integrase (INT) and aspartic protease (PR) genes and in a conserved cysteine-histidine (CH) zinc-finger-like domain. The retroelements also comprise long-terminal repeat (LTR) sequences that flank the internal region of the retroelement. Every family of retrotransposons has different, non-cross-hybridizing LTRs, and components within a family can vary (0-50%) in their LTR sequences. In the transposition process, the two LTRs are usually identical at the time of insertion, but as time passes substitutions can cause sequence divergence. Many retroelements are known, including centromere-specific retrotransposons (see, for example, SanMiguel et al. (1998) Nat Genet. 20:43-45; Turcotte et al. (2001) Plant J 25:169-179; Feng et al. (2002) Nature 420:316; Nagaki et al. (2004) Nat Genet. 36:138; Nagaki et al. (2003) Genetics 163:750-770: Wu et al. (2004) Plant Cell 16:967-976; Hansen and Haslop-Harrison (2004) Adv Bot Res 41:165-193).

[0107] There exists significant variation between centromeres of different maize chromosomes with respect to their relative size and the repeat composition. In maize CentC clusters can be as small as about 100 kb, or more than about 2000 kb in different chromosomes, but commonly in the range of about 200 kb to about 300 kb. Given the lower size range, it is possible that an entire central portion of maize centromere region could be found within a single BAC clone. The observed structural polymorphism suggests that a maize centromere is composed of redundant functional blocks, each of which may be capable of supporting centromere function. A significant (at least 10 fold) variation in centromere sizes as defined by the length and/or copy number of the CentC centromeric tandem repeats is observed among different maize chromosomes. There is also a significant variation in centromere size between homologous chromosomes from different inbreds.

[0108] In another aspect, the artificial plant minichromosome of the invention can comprise at least one functional telomere.

[0109] Telomeres are nucleoprotein caps at the ends of linear eukaryotic chromosomes essential for chromosomal end maintenance. Telomere DNA synthesis is done by telomerase, a ribonucleoprotein with reverse transcriptase activity (McKnight et al. (2002) Plant Mol Biol 48:331-337). Telomerase adds telomeric DNA onto the 3′ ends of chromosomes by copying a short template sequence within its RNA subunit. The telomeres of most organisms consist of highly conserved short asymmetric repeated sequences.

[0110] Many telomeric repeat sequences are known, including CCCCAA (C₄A₂, Tetrahymena & Paramecium); C₄A₄ (Oxytricha & Euplotes); C₃TA (Trypanosoma, Leishmania, & Physarum); C₁₋₃A (Saccharomyces); C₁₋₈T (Dictyostelium); and C₃TA₃ (Arabidopsis, human, mouse, Caenrhabditis). The number of repeats observed in native chromosomes varies widely between organisms, e.g., some ciliates have about 50 repeats, less than 350 repeats has been observed in Arabidopsis, and repeats totaling about 300-500 bp observed in Saccharomyces.

[0111] Telomere length in plants, which typically ranges from about 2-75 kb, is controlled by genetic and developmental factors. Telomeric regions have been isolated from Arabidopsis, and show tandem repeats heterogeneous in size (Richards and Ausubel, (1988) Cell 53:127-136). A 25-fold difference in the lengths of telomeres among inbred lines of maize was found, ranging from less than 2 kb for the WF9 line to about 40 kb for the CM37 line (Burr et al. (1992) Plant Cell 4:953-960). Closer toward the centromere, the canonical telomere repeat is often found mixed with other repetitive elements of the plant genome. In contrast, Drosophila uses transposons at the ends its chromosomes. The transposons, HeT-A and TART elements, are found in multiple copies at the end of each chromosome. Gradual shortening of the telomeres can be reversed by transposition of new transposon repeats to the ends. Similar to telomere maintenance by telomerase, the model for transposition in Drosophila invokes a mechanism using an RNA transposition intermediate which is converted into end DNA by reverse transcriptase.

[0112] DNA replication is the process by which cells make one complete copy of their genetic information before cell division. In E. coli, mammalian viruses, and S. cerevisiae, initiation of DNA replication is controlled by transacting initiator proteins that interact with cis-acting DNA replicator sequences. For S. cerevisiae, replicators encompass 100-200 bp and include the major replication origin sites where DNA synthesis begins. These replicators contain a conserved 11 bp autonomous replicating sequence (ARS) that binds the origin recognition complex (ORC) to nucleate formation of prereplication complexes (Gilbert (2001) Science 294:96-100).

[0113] In higher eukaryotes DNA replication can be initiated simultaneously in hundreds or thousands of chromosomal sites. Defined origin sequences are not required, many potential replication origins exist consisting of broad zones of closely spaced initiation sites, some of which may be used more frequently.

[0114] However, several specific eukaryotic origins of replication are known such as the origin of replication for 18S-26S rDNA which is located in a non-transcribed spacer (Ivessa and Zakian (2002) Genes Dev 16:2459-2464). This region is capable of promoting amplification of transgenic constructs (Hemann et al. (1994) DNA Cell Biol 13:437-445). Another specific origin is found in the downstream region of the dihydrofolate reductase (DHFR) gene in Chinese hamster ovary (CHO) cells (Altman and Fanning (2001) Mol Cell Biol 21:1098-1110). Preferential sites of replication initiation were also found in the Drosophila chromosome segment containing chorion genes (Levine and Spradling (1985) Chromosoma 92:136-142).

[0115] The replication machinery of plant and animal cells is likely capable of replicating any type of introgressed DNA, including integrated constructs, episomes, entire chromosomes, or their fragments (Gilbert (2001) Science 294:96-100).

[0116] Artificial minichromosomes are linear or circular DNA molecules constructed from cis-acting DNA sequence elements responsible for proper replication and partitioning of chromosomes to daughter cells. The cis-acting elements include: origins of replication (ori), the sites for initiation of DNA replication, also known as autonomous replication sequences (ARS); centromeres, the sites of kinetochore assembly for proper segregation of replicated chromosomes at mitosis and meiosis; and telomeres, specialized DNA repeat structures that stabilize the ends of linear chromosomes and facilitate complete replication of the chromosome ends.

[0117] Several strategies to produce eukaryotic minichromosomes are available, including but not limited to in vivo self-assembly of a minichromosome from component elements by the endogenous cellular chromosome maintenance machinery in the eukaryotic cell, assembly of a eukaryotic minichromosome from component elements in a prokaryotic cell, and in vitro assembly of a eukaryotic minichromosome from component elements.

[0118] Artificial minichromosomes were first constructed in Saccharomyces cerevisiae (Murray et al. (1986) Mol Cell Biol 6:3166-3172; Blackburn and Szostak (1984) Ann Rev Biochem 53:163-194). A circular plasmid comprising the yeast 125 bp centromere, an origin of replication, a selectable marker, and a palindromic arrangement of two stretches of telomeric DNA was assembled by conventional recombinant DNA techniques and introduced into yeast by spheroplast transformation where it resolved into a simple linear molecule. Linear constructs 50 kb in length containing a centromere, an origin of replication, and two telomeres replicated and segregated at mitosis with ˜99% accuracy, and retained in dividing cultures for at least 20 generations. The generation of YACs indicated the potential to assemble artificial chromosomes in other eukaryotes such as plants and animals. Experiments on YACs indicated that three cis-acting DNA sequences are needed to build an artificial chromosome: telomeres; origin(s) of replication; and a centromere.

[0119] Animal artificial chromosomes have been generated by two different approaches: generating de novo chromosomes from cloned DNA segments; or by fragmenting and rearranging a natural chromosome (Brown et al. (2000) Trends Biotechnol 18:402-403; Cooke (2001) Cloning Stem Cells 3:243-249; Lipps et al. (2003) Gene 304:23-33). The de novo approach, referred to as the assembly or bottom-up approach, generates artificial chromosomes by combining essential cloned components. Co-transfection of a mixture of human alphoid DNA, telomeres, human genomic DNA, and a selectable marker into HT1080 cells resulted in formation of minichromosomes (Harrington et al. (1997) Nat Genet. 15:345-355).

[0120] Characterization of the minichromosomes revealed that they all had complex cytogenetic structures, and were stably maintained in the absence of any selection. It was concluded that the minichromosomes and their centromere(s) were formed de novo from input DNA via complex rearrangements. Subsequently, other groups also used HT1080 cells to introduce linear or circular DNA constructs containing human alphoid DNA and telomeres cloned in YACs, PACs, or BACs (Compton et al. (1999) Nucl Acids Res 27:1762-1765; Grimes et al. (2001) EMBO Rep 2:910-914). Minichromosomes were observed with different frequencies and showed different mitotic stability. All minichromosomes produced were significantly bigger than the original constructs, varying from 5 to 10 Mb. Therefore, a fully functioning mammalian chromosome could be generated starting with cloned DNA serving as a backbone for de novo assembly.

[0121] Fragmentation and rearrangement of natural chromosomes retaining centromere and telomeric regions is another strategy for minichromosome production. Small chromosome fragments can be isolated by pulse field gel electrophoresis, retrofitted with desirable genes, and reintroduced into the host cell. Fragmented minichromosomes were observed in cancer cells, and other cell types after irradiation, however the fragments were too big for isolation and there was no way to control the gene composition.

[0122] One approach to control reduction of chromosome size was based on telomere associated chromosome fragmentation (TACF) or telomere directed truncation (TDT) (Heller et al. (1996) Proc Natl Acad Sci USA 93:7125-7130; Shen et al. (1997) Hum Mol Genet. 6:1375-1382). It involves successive fragmentation of specific human host chromosomes into smaller minichromosomes using a targeting vector encompassing a terminal telomere segment, a selectable marker, and sometimes a region of homology to the target chromosome. The resulting ‘engineered minichromosomes’ remain autonomous and segregate normally. Minichromosomes as small as 0.5 Mb have been generated containing alphoid DNA as the functional centromere sequence in human, hamster-human somatic cell hybrid lines, or chicken cells.

[0123] Recently, human artificial chromosomes were used to create transchromosomic-cloned calves producing human immunoglobulin. A human minichromosome (HAC) vector constructed by Cre/loxP mediated chromosome translocations and telomere-directed chromosome truncations in homologous recombination-proficient chicken DT40 cells was introduced into bovine primary fetal fibroblasts by microcell-mediated chromosome transfer (MMCT). Isolated nuclei from fetal fibroblasts with HAC were transferred into enucleated mature oocytes to produce cloned calves (Kuroiwa et al. (2002) Nat Biotechnol 20:889-894). An in vivo approach for generation of artificial chromosomes has been developed, based on the induction of intrinsic, large-scale amplification mechanisms of mammalian cells. Targeted integration of centromeric satellite DNA and the non-transcribed spacer of the rDNA on a specific chromosome resulted in large-scale amplification of centromeric regions. These amplified chromosomes become unstable and undergo significant rearrangements producing stable minichromosomes preferentially composed of satellite DNA (Kereso et al. (1996) Chromosome Res 4:226-239; Hadlaczky (2001) Curr Opin Mol Ther 3:125-132).

[0124] An artificial chromosome containing multiple sequence-specific recombination acceptor sites was developed (ACE platform). Sequences of interest are provided in a targeting vector, and lambda integrase enzyme used to catalyze recombination between the ACE platform and targeting vector.

[0125] Similar processes have been observed in plants. Spontaneous fragmentation of native chromosomes in plants has been observed. Minichromosomes were discovered in Arabidopsis (Murata et al. (2006) Chromosoma, published online Apr. 11, 2006), and maize (Brock and Pryor (1996) Chromosoma 104:575-584; Kato et al. (2005) Cytogenet Genome Res 109:156-165). In some instances, minichromosomes were induced by ionizing radiation (Riera-Lizarazu et al. (2000) Genetics 156:327-339).

[0126] A physical map of rice centromere 5 has been constructed, and could be used to create a rice artificial chromosome (Nonomura and Kurata, (2001) Chromosoma 110:284-291). A similar approach was proposed for the construction of an artificial chromosome for beet, Beta procumbens (Gindullis et al. (2001) Genome 44:846-855). Transgenic construct concatemerization, ligations, and rearrangements can be found in plant transformation events. General plant transformation with standard constructs can produce complex rearrangements, concatamerization, and construct amplification (Svitashev and Somers (2001) Genome 44:691-697; Svitashev et al. (2002) Plant J 32:443-445). Co-transformation of plants with multiple plasmids can produce transgenic loci containing combinations of the different transgenes (Wu et al. (2002) Transgenic Res 11:533-541). Similar to studies in animal cells, de novo assembly of artificial minichromosomes via spontaneous concatemerization and ligation of components can occur in plant cells (see, FIGS. 1-10, and 14-15).

[0127] The instant invention concerns an artificial plant minichromosome comprising a functional centromere, wherein the centromere specifically binds centromeric protein C.

[0128] Kinetochores link the centromeric DNA to the spindle fiber apparatus. Human autoantibodies that bind specifically near centromeres facilitated cloning of centromere-associated proteins (CENPs, Rattner (1991) Bioassays 13:51-56). At least one of these proteins belongs to the kinesin superfamily of microtubule motors (Yen (1991) EMBO J. 10:1245-1254). Yeast centromere-binding proteins have been identified through genetic and biochemical studies (Bloom (1993) Cell 73:621-624; Lechner et al. (1991) Cell 64:717-725). CENH3 is a highly conserved protein that replaces histone H3 in centromeres, is thought to recruit other proteins required for chromosome movement. CENH3 is present throughout the cell cycle and colocalizes with the kinetochore centromeric protein C (CENPC) in meiotic cells.

[0129] Antibodies specific to centromere-associated proteins can be used to confirm centromere assembly in a DNA construct and/or minichromosome. Immunolocalization of a CENP, such as CENH3 and/or CENPC, to the centromere of a minichromosome indicates formation of a functional centromere comprised of centromeric DNA elements and the associated binding proteins. Antiserum to maize centromeric histone H3 (CENH3, 17 kD) was made and tested on native maize chromosomes (Zhong et al. (2002) Plant Cell 14:2825-2836). Chromatin immunoprecipitation demonstrated that CentC and CRM2 interact specifically with CENH3. Approximately 38 and 33% of CentC and CRM2 were precipitated in the chromatin immunoprecipitation assay, confirming that much of CENH3 colocalizes with CentC. A maize homologue of mammalian CENPC was isolated by Dawe et al., ((1999) Plant Cell 11:1227-1238) and shown to be a component of the kinetochore in maize. A 20 amino acid conserved peptide from the amino terminal domain was used to produce antisera specific to maize CENPC, which was directly labeled and used to demonstrate that CENPC is specifically localized to the centromere of native and artificial minichromosomes in corn (see, e.g., FIGS. 3, 4, 8 and 10).

[0130] The centromeric repeat elements CentA, CentC, CRM1, and CRM2 include sequences that are substantially identical to the maize sequences for CentA, CentC, CRM1, and CRM2 of SEQ ID NOS:1-4. Substantially identical sequences include sequences that have a high homology to each other as exemplified by having significant percent sequence identity, and/or by selectively hybridizing under stringent conditions to a CentA, a CentC, a CRM1, or a CRM2 (SEQ ID NOS: 1-4), or a complement thereof. Sequences that selectively hybridize under stringent hybridization conditions include sequences that hybridize to the target sequence at least 2-fold over background and to the substantial exclusion of non-target nucleic acids. Selectively hybridizing sequences typically have about at least 80, 85, 90, 95, 96, 97, 98, 99 or 100% sequence identity to the target sequence. Any suitable hybridization conditions and buffers known in the art can be used, examples of which have been described herein. Sequence identity may be used to compare the primary structure of two polynucleotides or polypeptide sequences. Sequence identity measures the residues in the two sequences that are the same when aligned for maximum correspondence. Sequence relationships can be analyzed using computer-implemented algorithms. The sequence relationship between two or more polynucleotides, or two or more polypeptides can be determined by determining the best alignment of the sequences, and scoring the matches and the gaps in the alignment, which yields the percent sequence identity and the percent sequence similarity. Polynucleotide relationships can also be described based on a comparison of the polypeptides each encodes. Many programs and algorithms for comparison and analysis of sequences are known. Unless otherwise stated, sequence identity/similarity values provided herein refer to the value obtained using GAP Version 10 (GCG, Accelrys, San Diego, Calif.) using the following parameters: % identity and % similarity for a nucleotide sequence using GAP Weight of 50 and Length Weight of 3, and the nwsgapdna.cmp scoring matrix; % identity and % similarity for an amino acid sequence using GAP Weight of 8 and Length Weight of 2, and the BLOSUM62 scoring matrix (Henikoff and Henikoff (1992) Proc Natl Acad Sci USA 89:10915-10919). GAP uses the algorithm of Needleman & Wunsch (1970) J Mol Biol 48:443-453, to find the alignment of two complete sequences that maximizes the number of matches and minimizes the number of gaps. Substantially identical includes sequences having at least 80%, 85%, 90%, 91%, 92%, 93%, 94%, 95%, 96%, 97%, 98%, 99% or more sequence identity, wherein the sequences are expected to retain the native function based on the overall percent sequence identity, the sequence similarity, the overall alignment of primary sequence, the presence of conserved blocks of residues, the presence of conserved elements and/or domains, the presence of conserved functional domains, the presence of binding regions, the presence of catalytic residues, the predicted secondary and/or tertiary structure(s), the availability of known three-dimensional structures, and other criteria used by one of skill in the art to identify and predict a functional homologue of any particular sequence.

[0131] Variant polynucleotides include polynucleotides having at least one deletion, addition, and/or substitution in at least one of the 5′ end, 3′ end, and/or internal sites including introns or exons, as compared to the native polynucleotide. Variant polynucleotides include naturally occurring variants as well as synthetically derived polynucleotides, for example, those generated using site-directed mutagenesis. Conservative variants include sequences that maintain their function, encode the same polypeptide, or encode a variant polypeptide with substantially similar identity, function, and/or activity as the native polynucleotide. Variants can be identified with known techniques, for example, polymerase chain reaction (PCR), and/or hybridization techniques. Generally, variants of a particular polynucleotide will have at least about 40%, 45%, 50%, 55%, 60%, 65%, 70%, 75%, 80%, 85%, 90%, 91%, 92%, 93%, 94%, 95%, 96%, 97%, 98%, 99% or more sequence identity to that particular polynucleotide. Variant polynucleotides can also be evaluated by comparison of the percent sequence identity between the polypeptides encoded using standard alignment programs and parameters. When evaluated by comparison of the percent sequence identity shared by the two polypeptides each encodes, the percent sequence identity between the two encoded polypeptides is typically at least about 40%, 45%, 50%, 55%, 60%, 65%, 70%, 75%, 80%, 85%, 90%, 91%, 92%, 93%, 94%, 95%, 96%, 97%, 98%, 99% or more sequence identity.

[0132] Variant proteins include proteins having at least one deletion, addition, and/or substitution in at least one of the N-terminal end, C-terminal end, and/or an internal site, as compared to the native polypeptide. Variant proteins possess the desired biological activity of the protein. Variants include naturally occurring polypeptides, as well as those generated by human manipulation. Biologically active variants of a protein typically have at least about 40%, 45%, 50%, 55%, 60%, 65%, 70%, 75%, 80%, 85%, 90%, 91%, 92%, 93%, 94%, 95%, 96%, 97%, 98%, 99% or more sequence identity to the amino acid sequence for the native protein as determined by sequence alignment programs. A biologically active variant of a protein may differ from that protein by as few as 1-15 amino acid residues. Conservative substitutions generally refer to exchanging one amino acid with another having similar properties. For example, the model of Dayhoff et al. (1978) Atlas of Protein Sequence and Structure (Natl Biomed Res Found, Washington, D.C.) provides guidance on amino acid substitutions that are not expected to affect the biological activity of the protein.

[0133] Variant polynucleotides and proteins encompass sequences derived from mutagenic and/or recombinogenic procedures, such as mutagenesis and/or DNA shuffling. Methods for mutagenesis and nucleotide sequence alterations are known (see, e.g., Kunkel (1985) Proc Natl Acad Sci USA 82:488-492; Kunkel et al. (1987) Methods Enzymol 154:367-382; U.S. Pat. No. 4,873,192; Walker and Gaastra, eds. (1983) Techniques in Molecular Biology (MacMillan Publ. Co., NY) and the references cited therein). For example, one or more different recombinase coding sequences can be manipulated to create and select a new recombinase protein possessing the desired properties. Typically, libraries of recombinant polynucleotides are generated from a population of related sequences and can be homologously recombined in vitro or in vivo (see, e.g., Stemmer (1994) Proc Natl Acad Sci USA 91:10747-10751; Stemmer (1994) Nature 370:389-391; Crameri et al. (1997) Nat Biotechnol 15:436-438; Moore et al. (1997) J Mol Biol 272:336-347; Zhang et al. (1997) Proc Natl Acad Sci USA 94:4504-4509; Crameri et al. (1998) Nature 391:288-291; and U.S. Pat. Nos. 5,605,793, and 5,837,458). Generally, modifications in a polynucleotide encoding a polypeptide should not alter the reading frame, or create and/or alter DNA or mRNA secondary structure. See, EP Patent Application Publication Number 75,444.

[0134] Overlapping oligonucleotides, termed overgos, are primer pairs that span about 40 bp in length and are usually constituted from two 24-bp oligonucleotides that have an 8-bp overlapping region at the 3′ ends. This feature allows the overgo primer pair to prime on each other and synthesize their complementary strands with labeled nucleotides by the Klenow filling method (McPherson, (1999) Genome Analysis: A Laboratory Manual, 4:207-213, ed. Birren et al., Cold Spring Harbor Laboratory Press, Cold Spring Harbor, N.Y.). A variety of labeled nucleotides can be used, including but not limited to radioactive labeled nucleotides or fluorescent labeled nucleotides. This is useful for the generation of probes for different hybridization methods, including but not limited to colony hybridization, dot blots, Southern blots, and in situ hybridization, such as FISH. The major advantage of overgo probes over conventional probes for library hybridization is that the sequences for designing overgos can be selected, and thus repeated sequences present in a conventional DNA fragment probe can be avoided; therefore, the cross-hybridization problem that is frequently associated with large-genome DNA library screening can be minimized. Because of this advantage, overgo hybridization combined with the probe pooling strategy (Cai et al. (1998) Genomics 54:387-397; Chang et al. (2001) Genetics 159:1231-1242; Tao et al. (2001) Genetics 158:1711-1724; Romanov et al. (2003) Cytogenet Genome Res 101:277-281) has emerged as a method for high-throughput BAC library screening for clone identification and physical gene mapping.

[0135] In some examples genes or encoded polypeptides that can enhance or stimulate cell growth are provided with or within the DNA construct(s). Genes that enhance or stimulate cell growth include genes involved in transcriptional regulation, homeotic gene regulation, stem cell maintenance and proliferation, cell division, and/or cell differentiation such as WUS homologues (Mayer et al. (1998) Cell 95:805-815; WO01/0023575; US2004/0166563); aintegumenta (ANT) (Klucher et al. (1996) Plant Cell 8:137-153; Elliott et al. (1996) Plant Cell 8:155-168; GenBank Accession Numbers U40256, U41339, Z47554); clavata (e.g., CLV1, CVL2, CLV3) (WO03/093450; Clark et al. (1997) Cell 89:575-585; Jeong et al. (1999) Plant Cell 11:1925-1934; Fletcher et al. (1999) Science 283:1911-1914); Clavata and Embryo Surround region genes (e.g., CLE) (Sharma et al. (2003) Plant Mol Biol 51:415-425; Hobe et al. (2003) Dev Genes Evol 213:371-381; Cock and McCormick, (2001) Plant Physiol 126:939-942; Casamitjana-Martinez et al. (2003) Curr Biol 13:1435-1441); baby boom (e.g., BNM3, BBM, ODP1, ODP2) (WO00/75530; Boutileir et al. (2002) Plant Cell 14:1737-1749); Zwille (Lynn et al. (1999) Dev 126:469-481); leafy cotyledon (e.g., Lec1, Lec2) (Lotan et al. (1998) Cell 93:1195-1205; WO00/28058; Stone et al. (2001) Proc Natl Acad Sci USA 98:11806-11811; U.S. Pat. No. 6,492,577); Shoot Meristem-less (STM) (Long et al. (1996) Nature 379:66-69); ultrapetala (ULT) (Fletcher (2001) Dev 128:1323-1333); mitogen activated protein kinase (MAPK) (Jonak et al. (2002) Curr Opin Plant Biol 5:415); kinase associated protein phosphatase (KAPP) (Williams et al. (1997) Proc Natl Acad Sci USA 94:10467-10472; Trotochaud et al. (1999) Plant Cell 11:393-406); ROP GTPase (Wu et al. (2001) Plant Cell 13:2841-2856; Trotochaud et al. (1999) Plant Cell 11:393-406); fasciata (e.g., FAS1, FAS2) (Kaya et al. (2001) Cell 104:131-142); cell cycle genes (U.S. Pat. No. 6,518,487; WO99/61619; WO02/074909), Shepherd (SHD) (Ishiguro et al. (2002) EMBO J. 21:898-908); Poltergeist (Yu et al. (2000) Dev 127:1661-1670; Yu et al. (2003) Curr Biol 13:179-188); Pickle (PKL) (Ogas et al. (1999) Proc Natl Acad Sci USA 96:13839-13844); knox genes (e.g., KN1, KNAT1) (Jackson et al. (1994) Dev 120:405-413; Lincoln et al. (1994) Plant Cell 6:1859-1876; Venglat et al. (2002) Proc Natl Acad Sci USA 99:4730-4735); fertilization independent endosperm (FIE) (Ohad et al. (1999) Plant Cell 11:407-415), and the like. The combinations of polynucleotides include multiple copies of any one of the polynucleotides of interest, and the combinations may have any combination of up-regulating and down-regulating expression of the combined polynucleotides. The combinations may or may not be combined on one construct for transformation of the host cell, and therefore may be provided sequentially or simultaneously. The host cell may be a wild-type or mutant cell, in a normal or aneuploid state.

[0136] Site-specific recombinase systems can be used with any minichromosome system. Both integrases and recombinases capable of catalyzing both the forward and reverse reactions, are useful for introducing modifications after the DNA construct(s) or minichromosome has been established in the plant cell. Various intramolecular modifications, such as deletion or inversion of defined sequences can be done. Further, intermolecular insertions and exchanges can be done, including translocations with endogenous chromosomes comprising compatible site-specific recombination sites. The recombinase systems can also be used to establish target sites (docking sites) within the minichromosome for later site specific integration of polynucleotide(s) of interest provided by any method, including crossing or direct delivery.

[0137] Elements from recombination systems, such as recombinases, and recombination sites can be used, for example in a DNA construct, a target site, and/or a transfer cassette. A target site comprises a polynucleotide integrated into the genome, the polynucleotide comprising a promoter operably linked to at least one recombination site. A transfer cassette comprises at least a first recombination site operably linked to a polynucleotide of interest and/or a polynucleotide encoding a selection marker, wherein the first recombination site is recombinogenic with a recombination site in the target site. A targeted seed or plant has stably incorporated into its genome a DNA construct that has been generated and/or manipulated through the use of a recombination system. Site-specific recombination methods that result in various integration, alteration, and/or excision events to generate the recited DNA construct can be employed to generate a targeted seed. See, e.g., WO99/25821, WO99/25854, WO99/25840, WO99/25855, WO99/25853, WO99/23202, WO99/55851, WO01/07572, WO02/08409, and WO03/08045.

[0138] A recombinase is a polypeptide that catalyzes site-specific recombination between its compatible recombination sites, and includes naturally occurring recombinase sequences, variants, and/or fragments that retain activity. A recombination site is a nucleotide sequence that is specifically recognized by a recombinase enzyme, and encompasses naturally occurring recombination site sequences, variants, and/or fragments that retain activity. For reviews of site-specific recombinases, see, Sauer (1994) Curr Op Biotech 5:521-527; Sadowski (1993) FASEB 7:760-767; Groth and Calos, (2004) J Mol Biol 335:667-678; and Smith and Thorpe (2002) Mol Microbiol 44:299-307. Any recombination system, or combination of systems, can be used including but not limited to recombinases and recombination sites from the integrase and/or resolvase families, biologically active variants and fragments thereof, and/or any other naturally occurring or recombinantly produced enzyme or variant thereof that catalyzes conservative site-specific recombination between specified recombination sites, and naturally occurring or modified recombination sites or variants thereof that are specifically recognized by a recombinase to generate a recombination event.

[0139] The recombination sites employed can be corresponding sites or dissimilar sites. Corresponding recombination sites, or a set of corresponding recombination sites, are sites having an identical nucleotide sequence. A set of corresponding recombination sites, in the presence of the appropriate recombinase, will efficiently recombine with one another. Dissimilar recombination sites have a distinct sequence, comprising at least one nucleotide difference as compared to each other. The recombination sites within a set of dissimilar recombination sites can be either recombinogenic or non-recombinogenic with respect to one another. Each recombination site within the set of dissimilar sites is biologically active and can recombine with an identical site. Recombinogenic sites are capable of recombining with one another in the presence of the appropriate recombinase. Recombinogenic sites include those sites where the relative excision efficiency of recombination between the recombinogenic sites is above the detectable limit under standard conditions in an excision assay as compared to the wild type control, typically, greater than 2%, 5%, 10%, 20%, 50%, 100% or greater. Non-recombinogenic sites will not recombine with one another in the presence of the appropriate recombinase, or recombination between the sites is not detectable. Non-recombinogenic recombination sites include those sites that recombine with one another at a frequency lower than the detectable limit under standard conditions in an excision assay as compared to the wild type control, typically, lower than 2%, 1.5%, 1%, 0.75%, 0.5%, 0.25%, 0.1%, 0.075, 0.005%, 0.001%. Any suitable non-recombinogenic recombination sites may be utilized, including a FRT site or active variant thereof, a lox site or active variant thereof, an att site or active variant thereof, any combination thereof, or any other combination of non-recombinogenic recombination sites. Directly repeated recombination sites in a set of recombinogenic recombination sites are arranged in the same orientation, recombination between these sites results in excision of the intervening DNA sequence. Inverted recombination sites in a set of recombinogenic recombination sites are arranged in the opposite orientation, recombination between these sites results in inversion of the intervening DNA sequence.

[0140] The Integrase family of recombinases has over one hundred members and includes, for example, FLP, Cre, Dre, Int, and R. For other members of the Integrase family, see for example, Esposito et al. (1997) Nucl Acids Res 25:3605-3614; Nunes-Duby et al. (1998) Nucl Acids Res 26:391-406; Abremski et al. (1992) Protein Eng 5:87-91; Groth and Calos, (2004) J Mol Biol 335:667-678; and Smith and Thorpe, (2002) Mol Microbiol 44:299-307. Other recombination systems include, for example, streptomycete bacteriophage phiC31 (Kuhstoss et al. (1991) J Mol Biol 20:897-908); bacteriophage λ (Landy, (1989) Ann Rev Biochem 58:913-949, and Landy, (1993) Curr Op Genet Dev 3:699-707); SSV1 site-specific recombination system from Sulfolobus shibatae (Maskhelishvili et al. (1993) Mol Gen Genet. 237:334-342); and a retroviral integrase-based integration system (Tanaka et al. (1998) Gene 17:67-76). In some examples, the recombinase is one that does not require cofactors or a supercoiled substrate. Such recombinases include Cre, FLP, phiC31 Int, mutant λ Int, R, SSV1, Dre, or active variants or fragments thereof. FLP recombinase catalyzes a site-specific reaction between two FRT sites, and is involved in amplifying the copy number of the two-micron plasmid of S. cerevisiae during DNA replication. The FLP protein has been cloned and expressed. See, for example, Cox, (1993) Proc Natl Acad Sci USA 80:4223-4227. The FLP recombinase used may be derived from the genus Saccharomyces. In some examples a polynucleotide synthesized using plant-preferred codons encoding the recombinase is used. FLP enzyme encoded by a nucleotide sequence comprising maize preferred codons (FLPm) that catalyzes site-specific recombination events is known (U.S. Pat. No. 5,929,301). Additional functional variants and fragments of FLP are known. See, for example, Buchholz et al. (1998) Nat Biotechnol 16:617-618, Hartung et al. (1998) J Biol Chem 273:22884-22891, Saxena et al. (1997) Biochim Biophys Acta 1340:187-204, Hartley et al. (1980) Nature 286:860-864, Shaikh and Sadowski, (2000) J Mol Biol 302:27-48, Voziyanov et al. (2002) Nucl Acids Res 30:1656-1663, and Voziyanov et al. (2003) J Mol Biol 326:65-76. The bacteriophage P1 recombinase Cre catalyzes site-specific recombination between two lox sites. See, for example, Guo et al. (1997) Nature 389:40-46; Abremski et al. (1984) J Biol Chem 259:1509-1514; Chen et al. (1996) Somat Cell Mol Genet. 22:477-488; Shaikh et al. (1977) J Biol Chem 272:5695-5702; and, Buchholz et al. (1998) Nat Biotechnol 16:617-618. Cre polynucleotide sequences may also be synthesized using plant-preferred codons, for example, moCre (see, e.g., WO 99/25840), and other variants are known, see for example Vergunst et al. (2000) Science 290:979-982, Santoro and Schulz (2002) Proc Natl Acad Sci USA 99:4185-4190, Shaikh and Sadowski (2000) J Mol Biol 302:27-48, Rufer and Sauer (2002) Nucl Acids Res 30:2764-2771, Wierzbicki et al. (1987) Mol Biol 195:785-794, Petyuk et al. (2004) J Biol Chem 279:37040-37048, Hartung and Kisters-Wolke (1998) J Biol Chem 273:22884-22891, Koresawa et al. (2000) J Biochem (Tokyo) 127:367-372, U.S. Pat. No. 6,890,726, and Buchholz and Stewart (2001) Nat Biotechnol 19:1047-1052. A Cre homolog has been identified in P1-related phages, the recombinase isolated from phage D6 is known as Dre which is a tyrosine recombinase closely related to Cre, but which recognizes distinct 32 bp rox sites (Sauer and McDermott (2004) Nucl Acids Res 32:1-10). The phiC31 integrase and variants are known (Kushtoss et al. (1991) J Mol Biol 222:897-908, WO03/066867, WO05/017170, US2005/0003540, and Sclimenti et al. (2001) Nucl Acids Res 29:5044-5051. The X integrase and cofactors (Hoess et al. (1980) Proc Natl Acad Sci USA 77:2482-2486, Blattner et al. (1997) Science 277:1453-1474), and variants thereof are known, including cofactor-independent Int variants (Miller et al. (1980) Cell 20:721-729, Lange-Gustafson and Nash (1984) J Biol Chem 259:12724-12732, Christ et al. (1998) J Mol Biol 288:825-836, and Lorbach et al. (2000) J Mol Biol 296:1175-1181), att site recognition variants (Dorgai et al. (1995) J Mol Biol 252:178-188, Yagu et al. (1995) J Mol Biol 252:163-167, and Dorgai et al. (1998) J Mol Biol 277:1059-1070), as well as maize codon optimized Int, variant, and cofactor sequences (WO03/08045). Other integrases and variants are known, such as HK022 integrase (Kolot et al. (1999) Mol Biol Rep 26:207-213) and variants such as att site recognition variants (Dorgai et al. (1995) J Mol Biol 252:178-188, Yagu et al. (1995) J Mol Biol 252:163-167, and Dorgai et al. (1998) J Mol Biol 277:1059-1070).

[0141] Wild-type recombination sites, mutant, or any combination of wild type and/or mutant sites can be used. Such recombination sites include, for example, wild type lox, FRT, and att sites, and mutant lox, FRT, and att sites. An analysis of the recombination activity of mutant lox sites is presented in Lee et al. (1998) Gene 216:55-65. Other recombination sites and variants are known, see for example, Hoess et al. (1982) Proc Natl Acad Sci USA 79:3398-3402; Hoess et al. (1986) Nucl Acids Res 14:2287-2300; Thomson et al. (2003) Genesis 36:162-167; Schlake and Bode (1994) Biochemistry 33:12746-12751; Siebler and Bode (1997) Biochemistry 36:1740-1747; Huang et al. (1991) Nucl Acids Res 19:443-448; Sadowski (1995) in Progress in Nucleic Acid Research and Molecular Biology 51:53-91; Cox (1989) in Mobile DNA, Berg and Howe (eds) American Society of Microbiology, Washington D.C., pp. 116-670; Dixon et al. (1995) Mol Microbiol 18:449-458; Umlauf and Cox (1988) EMBO J. 7:1845-1852; Buchholz et al. (1996) Nucl Acids Res 24:3118-3119; Kilby et al. (1993) Trends Genet. 9:413-421; Rossant and Geagy (1995) Nat Med 1:592-594; Bayley et al. (1992) Plant Mol Biol 18:353-361; Odell et al. (1990) Mol Gen Genet 223:369-378; Dale and Ow (1991) Proc Natl Acad Sci USA 88:10558-10562; Qui et al. (1994) Proc Natl Acad Sci USA 91:1706-1710; Stuurman et al. (1996) Plant Mol Biol 32:901-913; Dale et al. (1990) Gene 91:79-85; Albert et al. (1995) Plant J 7:649-659, U.S. Pat. No. 6,465,254, WO01/23545, WO99/55851, and WO01/11058. In some examples, sets of dissimilar and corresponding recombination sites can be used, for example sites from different recombination systems. Accordingly, any suitable recombination site or set of recombination sites may be used, including a FRT site, a biologically active variant of a FRT site, a lox site, a biologically active variant of a lox site, an att site, a biologically active variant of an att site, any combination thereof, or any other combination of recombination sites. Examples of FRT sites include, for example, the minimal wild type FRT site (FRT1), and various mutant FRT sites, including but not limited to FRT5, FRT6, and FRT7 (see, U.S. Pat. No. 6,187,994). Additional variant FRT sites are known, (see, e.g., WO01/23545, and US Patent Application Publication 2007/0015195, herein incorporated by reference). Other recombination sites that can be used include att sites, such as those disclosed in Landy (1989) Ann Rev Biochem 58:913-949, Landy (1993) Curr Op Genet Dev 3:699-707, U.S. Pat. No. 5,888,732, WO01/07572, and Thygarajan et al. (2001) Mol Cell Biol 21:3926-3934. The site-specific recombinase(s) used depend on the recombination sites in the target site and the transfer cassette. If FRT sites are utilized, FLP recombinase is provided, when lox sites are utilized, Cre recombinase is provided, when λ att sites are used, λ Int is provided, when phiC31 att sites are used, phiC31 Int is provided. If the recombination sites used comprise sites from different systems, for example a FRT and a lox site, both recombinase activities can be provided, either as separate entities, or as a chimeric recombinase, for example FLP/Cre (see, e.g., WO 99/25840).

[0142] A marker provides for the identification and/or selection of a cell, plant, and/or seed expressing the marker. Markers include, e.g., screenable, visual, and/or selectable marker. A selection marker is any marker, which when expressed at a sufficient level, confers resistance to a selective agent. For example visual markers can be used to identify transformed cells comprising the introduced DNA construct(s). In one example the visual marker is a fluorescent protein. Such fluorescent proteins include but are not limited to yellow fluorescent protein (YFP), green fluorescent protein (GFP), cyan fluorescent protein (CFP), and red fluorescent protein (RFP). In still other examples, the visual marker is encoded by a polynucleotide having maize preferred codons. In further examples, the visual marker comprises GFPm, AmCyan, ZsYellow, or DsRed. See, Wenck et al. (2003) Plant Cell Rep. 22:244-251.

[0143] Selection markers and their corresponding selective agents include, but are not limited to, herbicide resistance genes and herbicides; antibiotic resistance genes and antibiotics; and other chemical resistance genes with their corresponding chemical agents. Bacterial drug resistance genes include, but are not limited to, neomycin phosphotransferase II (nptII) which confers resistance to kanamycin, paromycin, neomycin, and G418, and hygromycin phosphotransferase (hph) which confers resistance to hygromycin B. See also, Bowen (1993) Markers for Plant Gene Transfer, Transgenic Plants, Vol. 1, Engineering and Utilization; Everett et al. (1987) Bio/Technology 5:1201-1204; Bidney et al. (1992) Plant Mol Biol 18:301-313; and WO97/05829.

[0144] Resistance may also be conferred to herbicides from several groups, including amino acid synthesis inhibitors, photosynthesis inhibitors, lipid inhibitors, growth regulators, cell membrane disrupters, pigment inhibitors, seedling growth inhibitors, including but not limited to imidazolinones, sulfonylureas, triazolopyrimidines, glyphosate, sethoxydim, fenoxaprop, glufosinate, phosphinothricin, triazines, bromoxynil, and the like. See, for example, Holt (1993) Ann Rev Plant Physiol Plant Mol Biol 44:203-229; and Miki et al. (2004) J Biotechnol 107:193-232. Selection markers include sequences that confer resistance to herbicides, including but not limited to, the bar gene, which encodes phosphinothricin acetyl transferase (PAT) which confers resistance to glufosinate (Thompson et al. (1987) EMBO J. 6:2519-2523); glyphosate oxidoreductase (GOX), glyphosate N-acetyltransferase (GAT), and 5-enol pyruvylshikimate-3-phosphate synthase (EPSPS) which confer resistance to glyphosate (Barry et al, (1992) in Biosynthesis and Molecular Regulation of Amino Acids in Plants, Singh et al. (Eds) pp. 139-145; Kishore et al. (1992) Weed Tech 6:626-634; Castle (2004) Science 304:1151-1154; Zhou et al. (1995) Plant Cell Rep 15:159-163; WO97/04103; WO02/36782; and WO03/092360). Other selection markers include dihydrofolate reductase (DHFR), which confers resistance to methotrexate (see, e.g., Dhir et al. (1994) Improvements of Cereal Quality by Genetic Engineering, Henry (ed), Plenum Press, New York; and Hauptmann et al. (1988) Plant Physiol 86:602-606). Acetohydroxy acid synthase (AHAS or ALS) mutant sequences lead to resistance to imidiazolinones and/or sulfonylureas such as imazethapyr and/or chlorsulfuron (see, e.g., Zu et al. (2000) Nat Biotechnol 18:555-558; U.S. Pat. Nos. 6,444,875 and 6,660,910; Sathasivan et al. (1991) Plant Physiol 97:1044-1050; Ott et al. (1996) J Mol Biol 263:359-368; and Fang et al. (1992) Plant Mol Biol 18:1185-1187).

[0145] In addition, chemical resistance genes further include tryptophan decarboxylase which confers resistance to 4-methyl tryptophan (4-mT) (Goodijn et al. (1993) Plant Mol Biol 22:907-912); and bromoxynil nitrilase which confers resistance to bromoxynil. The selection marker may comprise cyanamide hydratase (Cah), see, for example, Greiner et al. (1991) Proc Natl Acad Sci USA 88:4260-4264; and Weeks et al. (2000) Crop Sci 40:1749-1754. Cyanamide hydratase enzyme converts cyanamide into urea, thereby conferring resistance to cyanamide. Any form or derivative of cyanamide can be used as a selection agent including, but not limited to, calcium cyanamide (Perlka® (SKW, Trotberg Germany) and hydrogen cyanamide (Dormex® (SKW)). See also, U.S. Pat. Nos. 6,096,947 and 6,268,547. Variants of cyanamide hydratase polynucleotides and/or polypeptides will retain cyanamide hydratase activity. A biologically active variant of cyanamide hydratase will retain the ability to convert cyanamide to urea. Methods to assay for such activity include assaying for the resistance of plants expressing the cyanamide hydratase to cyanamide. Additional assays include the cyanamide hydratase colorimetric assay (see, e.g., Weeks et al. (2000) Crop Sci 40:1749-1754; and U.S. Pat. No. 6,268,547).

[0146] The present invention also concerns an isolated polynucleotide comprising: (a) at least two arrays of tandem repeats of CentC in an inverted orientation wherein the first array comprises at least ten copies of CentC and the second array comprises at least ten copies of CentC; and, (b) at least one copy of a retrotransposable element, wherein the retrotransposable element is situated between the first and the second array. Suitable retrotransposable elements are discussed above.

[0147] Also within the scope of the invention is an isolated polynucleotide comprising: (a) at least one array of tandem repeats of CentC, the array comprising at least ten copies of CentC; and, (b) at least one copy of a retrotransposable element selected from the group consisting of CentA, CRM1, and CRM2.

[0148] In still another aspect, the present invention concerns an isolated polynucleotide comprising: (a) at least one array of tandem repeats of CentC, the array comprising at least ten copies of CentC; and, (b) at least one copy each of CentA, CRM1, and CRM2.

[0149] The isolated polynucleotides comprise at least one array of tandem repeats of CentC. Each array of CentC repeats may comprise at least 5, 10, 15, 20, 25, 30, 40, 50, 60, 70, 80, 90, 100, 120, 140, 150, 160, 180, 200, 220, 240, 250, 260, 280 or 300 copies of CentC. Further, each array of tandem repeats of CentC may be interrupted by another sequence element, including but not limited to a retrotransposon, which is inserted between copies of CentC, or within a CentC element, or within a retrotransposon, or any other sequence element in the array. Retrotransposons include, but are not limited to, CentA, CRM1, and CRM2.

[0150] A polynucleotide includes any nucleic acid molecule, and comprises naturally occurring, synthetic, and/or modified ribonucleotides, deoxyribonucleotides, and combinations of ribonucleotides and deoxyribonucleotides. Polynucleotides encompass all forms of sequences including, but not limited to, single-stranded, double-stranded, linear, circular, branched, hairpins, stem-loop structures, and the like.

[0151] Also within the scope of the invention is a recombinant construct comprising any of the isolated polynucleotides of the invention. A recombinant DNA construct comprises a polynucleotide which when present in the genome of a plant is heterologous or foreign to that chromosomal location in the plant genome. In preparing the DNA construct, various fragments may be manipulated to provide the sequences in a proper orientation and/or in the proper reading frame. Adapters or linkers may be employed to join the fragments. Other manipulations may be used to provide convenient restriction sites, removal of superfluous DNA, or removal of restriction sites. For example, in vitro mutagenesis, primer repair, restriction, annealing, resubstitutions, transitions, transversions, or recombination systems may be used. Polynucleotides of interest refer to any nucleic acid molecule included in the DNA construct(s) for any purpose, including but not limited to untranslated regions, regulatory regions, transcription initiation regions, translation initiation regions, introns, exons, polynucleotides encoding an RNA, selection markers, screenable markers, phenotypic markers, polynucleotides encoding a recombinase, recombination sites, target sites, transfer cassettes, restriction sites, recognition sites, insulators, enhancers, spacer/stuffer sequences, origins of replication, telomeric sequence, operators, and the like, can be provided in a DNA construct(s). The construct can include 5′ and 3′ regulatory sequences operably linked to the appropriate sequences. The DNA construct(s) can include in the 5′ to 3′ direction of transcription at least one of the following, a transcriptional and translational initiation region, the polynucleotide, and a transcriptional and translational termination region functional in plants. Alternatively, the DNA construct(s) may lack at least one 5′ and/or 3′ regulatory element. For example, DNA construct(s) may be designed such that upon introduction into a cell and in the presence of the appropriate recombinase a recombination event at the target site operably links the 5′ and/or 3′ regulatory regions to the appropriate sequences of the DNA construct(s).

[0152] Regulatory elements can be used in a variety of ways depending on the polynucleotide element, recombination site, transfer cassette and/or target site employed. In some examples intervening sequences can be present between operably linked elements and not disrupt the functional linkage. For example, an operable linkage between a promoter and a polynucleotide of interest allows the promoter to initiate and mediate transcription of the polynucleotide of interest. In some examples a translational start site is operably linked to a recombination site. In some examples, a recombination site is within an intron.

[0153] A cassette may additionally contain at least one additional sequence to be introduced into the plant. Alternatively, additional sequence(s) can be provided separately. DNA constructs can be provided with a plurality of restriction sites or recombination sites for manipulation of the various components and elements. DNA constructs may additionally contain selectable marker genes.

[0154] A transcriptional initiation region may be native, analogous, foreign, or heterologous to the plant host or to the polynucleotide of interest, and may be a natural sequence, a modified sequence, or a synthetic sequence. A number of promoters can be used to express a coding sequence.

[0155] A variety of promoters useful in plants is reviewed in Potenza et al. (2004) In Vitro Cell Dev Biol Plant 40:1-22. In some examples, the promoter expressing the selection marker is active in the seed. Promoters active in the seed include constitutive promoters, for example, the core promoter of the Rsyn7 promoter and other constitutive promoters disclosed in WO99/43838 and U.S. Pat. No. 6,072,050; the core CaMV 35S promoter (Odell et al. (1985) Nature 313:810-812); the MVV (mirabilis mosaic virus) promoter (Dey and Maiti (1999) Plant Mol Biol 40:771-782); rice actin (McElroy et al. (1990) Plant Cell 2:163-171); ubiquitin (Christensen et al. (1989) Plant Mol Biol. 12:619-632, and Christensen et al. (1992) Plant Mol Biol 18:675-689); pEMU (Last et al. (1991) Theor Appl Genet. 81:581-588); MAS (Velten et al. (1984) EMBO J. 3:2723-2730); ALS promoter (U.S. Pat. No. 5,659,026), and the like. Other constitutive promoters include those disclosed in, e.g., U.S. Pat. Nos. 5,608,149; 5,608,144; 5,604,121; 5,569,597; 5,466,785; 5,399,680; 5,268,463; 5,608,142 and 6,177,611.

[0156] The promoter may be a tissue-preferred promoter, to target enhanced expression within a particular plant tissue. In some examples, a seed-preferred promoter is used to express the selection marker. Seed-preferred promoters include both seed-specific promoters, active during seed development, as well as seed-germinating promoters, active during seed germination. See, Thompson et al. (1989) BioEssays 10:108. Seed-preferred promoters include, but are not limited to, Cim1 (cytokinin-induced message); cZ19B1 (maize 19 kDa zein); milps (myo-inositol-1-phosphate synthase) (see, WO00/11177, and U.S. Pat. No. 6,225,529), bean β-phaseolin, napin, β-conglycinin, soybean lectin, cruciferin, maize 15 kDa zein, 22 kDa zein, 27 kDa zein, waxy, shrunken 1, shrunken 2, globulin 1, end1, and end2 (WO00/12733), and the like.

[0157] A chemical-regulated promoter can be used to modulate expression in the seed through the application of an exogenous chemical regulator. The promoter may be a chemical-inducible promoter, where application of the chemical induces gene expression, or a chemical-repressible promoter, where application of the chemical represses gene expression. Chemical-inducible promoters include, but are not limited to, the maize In2-2 promoter, activated by benzenesulfonamide herbicide safeners; the maize GST promoter, activated by hydrophobic electrophilic compounds (e.g., some pre-emergent herbicides); and the tobacco PR-1a promoter, activated by salicylic acid. Other chemical-regulated promoters of interest include steroid-responsive promoters (see, for example, the glucocorticoid-inducible promoter in Schena et al. (1991) Proc Natl Acad Sci USA 88:10421-10425 and McNellis et al. (1998) Plant J 14:247-257) and tetracycline-inducible and tetracycline-repressible promoters (see, e.g., Gatz et al. (1991) Mol Gen Genet 227:229-237, and U.S. Pat. Nos. 5,814,618 and 5,789,156).

[0158] The DNA construct(s) can comprise expression units. Expression units can have elements including, but not limited to, introns, enhancers, leaders insulators, spacers, regions encoding an RNA, marker genes, recombination sites, termination regions, sequences encoding recombinases, enhancers, linkers, recognition sites, etc. In addition, the DNA constructs can comprise transfer cassettes, target sites, or any portions or combinations thereof. The DNA construct(s) can be modified in a variety of ways including but limited to site-specific recombination/integration methods or transposon-based transpositions, to provide a number of variations in the DNA construct(s). Polynucleotide sequences may be modified for expression in the plant. See, e.g., Campbell and Gowri (1990) Plant Physiol 92:1-11. Methods for synthesizing plant-preferred genes include, e.g., U.S. Pat. Nos. 5,380,831, 5,436,391 and Murray et al. (1989) Nucl Acids Res 17:477-498.

[0159] Additional sequence modifications are known to enhance gene expression in a cellular host. These include elimination of sequences encoding spurious polyadenylation signals, exon-intron splice site signals, transposon-like repeats, and other such well-characterized sequences that may be deleterious to gene expression. The G-C content of the sequence may be adjusted to average levels for a given host, as calculated by reference to endogenous genes expressed in the host. The sequence may also be modified to avoid secondary mRNA structures. Cassettes may additionally contain 5′ leader sequences in the DNA cassette which may act to enhance translation. Translation leaders include, e.g., pimaizeavirus leaders such as EMCV leader (Elroy-Stein et al. (1989) Proc Natl Acad Sci USA 86:6126-6130); potyvirus leaders such as TEV leader (Gallie et al. (1995) Gene 165:233-238), MDMV leader (Kong et al. (1988) Arch Virol 143:1791-1799), and human immunoglobulin heavy-chain binding protein (BiP) (Macejak et al. (1991) Nature 353:9094); untranslated leader from the coat protein mRNA of alfalfa mosaic virus (AMV RNA 4) (Jobling et al. (1987) Nature 325:622-625); tobacco mosaic virus leader (TMV) (Gallie et al. (1989) in Molecular Biology of RNA, ed. Cech (Liss, N.Y.), pp. 237-256); and maize chlorotic mottle virus leader (MCMV) (Lommel et al. (1991) Virology 81:382-385). See also, Della-Cioppa et al. (1987) Plant Physiol 84:965-968. Other methods or sequences known to enhance translation can also be utilized, such as introns, and the like.

[0160] Sequences of interest include, e.g., zinc fingers, kinases, heat shock proteins, transcription factors, DNA repair, agronomic traits, insect resistance, disease resistance, herbicide resistance, sterility, oil, protein, starch, digestibility, kernel size, maturity, nutrient composition, levels or metabolism, and the like. Insect resistance genes may encode resistance to pests such as rootworm, cutworm, European Maize Borer, and the like. Such genes include, e.g., B. thuringiensis toxic protein genes (U.S. Pat. Nos. 5,366,892; 5,747,450; 5,736,514; 5,723,756; 5,593,881; Geiser et al. (1986) Gene 48:109) and the like. Disease resistance traits include detoxification genes, such as against fumonosin (U.S. Pat. No. 5,792,931); avirulence (avr) and disease resistance (R) genes (Jones et al. (1994) Science 266:789; Martin et al. (1993) Science 262:1432; Mindrinos et al. (1994) Cell 78:1089); and the like. Herbicide resistance traits include genes coding for resistance to herbicides including sulfonylurea-type herbicides (e.g., the S4 and/or Hra mutations in ALS), herbicides that act to inhibit action of glutamine synthase, such as phosphinothricin or basta (e.g., the bar gene), EPSPS (U.S. Pat. Nos. 6,867,293; 5,188,642 and 5,627,061), GOX (Zhou et al. (1995) Plant Cell Rep 15:159-163), and GAT (U.S. Pat. No. 6,395,485). Antibiotic resistance genes may also be used, such as the nptII gene which encodes resistance to the antibiotics kanamycin and geneticin. Sterility genes can also be used, for example as an alternative to detasseling, including male tissue-preferred genes and genes with male sterility phenotypes such as QM (e.g., U.S. Pat. No. 5,583,210), kinases, and those encoding compounds toxic to either male or female gametophytic development.

[0161] Reduction of the activity of specific genes, silencing and/or suppression may be desired. Many techniques for gene silencing are known, including but not limited to antisense technology (see, e.g., Sheehy et al. (1988) Proc Natl Acad Sci USA 85:8805-8809; and U.S. Pat. Nos. 5,107,065; 5,453,566 and 5,759,829); cosuppression (e.g., Taylor (1997) Plant Cell 9:1245; Jorgensen (1990) Trends Biotech 8:340-344; Flavell (1994) Proc Natl Acad Sci USA 91:3490-3496; Finnegan et al. (1994) Bio/Technology 12:883-888; and Neuhuber et al. (1994) Mol Gen Genet. 244:230-241); RNA interference (Napoli et al. (1990) Plant Cell 2:279-289; U.S. Pat. No. 5,034,323; Sharp (1999) Genes Dev 13:139-141; Zamore et al. (2000) Cell 101:25-33; Javier (2003) Nature 425:257-263; and Montgomery et al. (1998) Proc Natl Acad Sci USA 95:15502-15507), virus-induced gene silencing (Burton et al. (2000) Plant Cell 12:691-705; and Baulcombe (1999) Curr Op Plant Bio 2:109-113); target-RNA-specific ribozymes (Haseloff et al. (1988) Nature 334: 585-591); hairpin structures (Smith et al. (2000) Nature 407:319-320; WO99/53050; WO02/00904 and WO98/53083); ribozymes (Steinecke et al. (1992) EMBO J. 11:1525; U.S. Pat. No. 4,987,071; and Perriman et al. (1993) Antisense Res Dev 3:253); oligonucleotide mediated targeted modification (e.g., WO03/076574: and WO99/25853); Zn-finger targeted molecules (e.g., WO01/52620; WO03/048345 and WO00/42219); and other methods, or combinations of the above methods.

[0162] The termination region may be native with the transcriptional initiation region, may be native with the operably linked DNA sequence of interest, or may be derived from another source. Convenient termination regions are available from the Ti-plasmid of A. tumefaciens, such as the octopine synthase and nopaline synthase termination regions. See also, Guerineau et al. (1991) Mol Gen Genet. 262:141-144; Proudfoot (1991) Cell 64:671-674; Sanfacon et al. (1991) Genes Dev 5:141-149; Mogen et al. (1990) Plant Cell 2:1261-1272; Munroe et al. (1990) Gene 91:151-158; Ballas et al. (1989) Nucl Acids Res 17:7891-7903 and Joshi et al. (1987) Nucl Acids Res 15:9627-9639.

[0163] In still another aspect, the present invention concerns a method for making a transgenic corn plant comprising an artificial plant minichromosome having a functional centromere, the method comprising:

[0164] (a) contacting at least one corn plant cell with a mixture comprising a recombinant construct of the invention;

[0165] (b) identifying at least one corn plant cell from step (a) comprising an artificial plant minichromosome having a functional centromere; and

[0166] (c) regenerating a fertile corn plant from the corn plant cell of step (b) wherein said corn plant comprises an artificial plant minichromosome having a functional centromere.

[0167] The mixture can further comprise a polynucleotide encoding a polypeptide that stimulates cell growth. Examples of polypeptides that stimulate cell growth include, but are not limited to, a wuschel, a baby boom, a RepA, or a Lec1.

[0168] Any method for introducing a sequence into a plant can be used, as long as the polynucleotide or polypeptide gains access to the interior of at least one cell. Methods for introducing sequences into plants are known and include, but are not limited to, stable transformation, transient transformation, virus-mediated methods, and sexual breeding. Stably incorporated indicates that the introduced polynucleotide is integrated into a genome and is capable of being inherited by progeny. Transient transformation indicates that an introduced sequence does not integrate into a genome such that it is heritable by progeny from the host. The plants and seeds employed may have a DNA construct stably incorporated into their genome. Any protocol may be used to introduce the DNA construct, any component of site-specific recombination systems, a polypeptide, or any other polynucleotide of interest. Providing comprises any method that brings together any polypeptide and/or a polynucleotide with any other recited components. Any means can be used to bring together a target site, transfer cassette, and appropriate recombinase, including, for example, stable transformation, transient delivery, and sexual crossing (see, e.g., WO99/25884). In some examples, the recombinase may be provided in the form of the polypeptide or mRNA. A series of protocols may be used in order to bring together the various components. For instance, a cell can be provided with at least one of these components via a variety of methods including transient and stable transformation methods; co-introducing a recombinase DNA, mRNA or protein directly into the cell; employing an organism (e.g., a strain or line) that expresses the recombinase; or growing/culturing the cell or organism carrying a target site, crossing to an organism expressing an active recombinase protein, and selecting events in the progeny. A simple integration pattern is produced when the transfer cassette integrates predominantly at the target site. Any promoter, including constitutive, inducible, developmentally, temporal, and/or spatially regulated promoter, etc., that is capable of regulating expression in the organism may be used.

[0169] Transformation protocols as well as protocols for introducing polypeptides or polynucleotide sequences into plants may vary depending on the type of plant or plant cell targeted for transformation. Suitable methods of introducing polypeptides and polynucleotides into plant cells include microinjection (Crossway et al. (1986) Biotechniques 4:320-334, U.S. Pat. No. 6,300,543; and U.S. patent application Ser. Nos. 11/427,947 and 11/427,371 all of which are herein incorporated by reference), electroporation (Riggs et al. (1986) Proc Natl Acad Sci USA 83:5602-5606, Agrobacterium-mediated transformation (U.S. Pat. Nos. 5,563,055 and 5,981,840), direct gene transfer (Paszkowski et al. (1984) EMBO J. 3:2717-2722), and ballistic particle acceleration (U.S. Pat. Nos. 4,945,050; 5,879,918; 5,886,244 and 5,932,782; Tomes et al. (1995) in Plant Cell, Tissue, and Organ Culture: Fundamental Methods, ed. Gamborg & Phillips (Springer-Verlag, Berlin); McCabe et al. (1988) Biotechnology 6:923-926); and Lec1 transformation (WO00/28058). Also, see Weissinger et al. (1988) Ann Rev Genet. 22:421-477; Sanford et al. (1987) Particulate Science and Technology 5:27-37 (onion); Christou et al. (1988) Plant Physiol 87:671-674 (soybean); Finer and McMullen (1991) In Vitro Cell Dev Biol 27P:175-182 (soybean); Singh et al. (1998) Theor Appl Genet. 96:319-324 (soybean); Datta et al. (1990) Biotechnology 8:736-740 (rice); Klein et al. (1988) Proc Natl Acad Sci USA 85:4305-4309 (maize); Klein et al. (1988) Biotechnology 6:559-563 (maize); U.S. Pat. Nos. 5,240,855; 5,322,783 and, 5,324,646; Klein et al. (1988) Plant Physiol 91:440-444 (maize); Fromm et al. (1990) Biotechnology 8:833-839 (maize); Hooykaas-Van Slogteren et al. (1984) Nature 311:763-764; U.S. Pat. No. 5,736,369 (cereals); Bytebier et al. (1987) Proc Natl Acad Sci USA 84:5345-5349 (Liliaceae); De Wet et al. (1985) in The Experimental Manipulation of Ovule Tissues, ed. Chapman et al. (Longman, N.Y.), pp. 197-209 (pollen); Kaeppler et al. (1990) Plant Cell Rep 9:415-418, Kaeppler et al. (1992) Theor Appl Genet. 84:560-566 (whisker-mediated transformation); D'Halluin et al. (1992) Plant Cell 4:1495-1505 (electroporation); Li et al. (1993) Plant Cell Rep 12:250-255; Christou and Ford (1995) Ann Bot 75:407-413 (rice); Osjoda et al. (1996) Nat Biotechnol 14:745-750 (maize via A. tumefaciens); and Ch. 8, pp. 189-253 in Advances in Cellular and Molecular Biology of Plants, Vol. 5, Ed. Vasil, Kluwer Acad Publ (Dordrecht, The Netherlands) 1999.

[0170] Various compounds can be used in conjunction with any direct delivery methods for introducing into plant cells any polynucleotide, polypeptide, or combinations thereof, optionally containing other components. For example, microprojectiles for a particle gun method can be prepared by associating DNA construct(s) with the microprojectiles in the presence of a cationic lipid solution, liposome solution, cationic polymer, DNA binding protein, cationic protein, cationic peptide, cationic polyamino acid, or combination thereof. In some examples, microprojectiles for a particle gun method are prepared by associating DNA construct(s) with the microprojectiles in the presence of Tfx-10, Tfx-20, Tfx-50, Lipofectin, Lipofectamine, Cellfectin, Effectene, Cytofectin GSV, Perfect Lipids, DOTAP, DMRIE-C, FuGENE-6, Superfect, Polyfect, polyethyleneimine, chitosan, protamine Cl, DNA binding proteins, histone H1, histone CENH3, poly-L lysine, DMSA, and the like.

[0171] The polynucleotide may be introduced into plants by contacting plants with a virus, or viral nucleic acids. Generally, such methods involve incorporating a desired polynucleotide within a viral DNA or RNA molecule. The sequence may initially be synthesized in a viral polyprotein and later processed in vivo or in vitro to produce a desired protein. Useful promoters encompass promoters utilized for transcription by viral RNA polymerases. Methods for introducing polynucleotides into plants and expressing a protein encoded, involving viral DNA or RNA molecules, are known, see, e.g., U.S. Pat. Nos. 5,889,191; 5,889,190; 5,866,785; 5,589,367; 5,316,931; and Porta et al. (1996) Mol Biotech 5:209-221.

[0172] Various components, including those from a site-specific recombination system, can be provided to a plant using a variety of transient methods. Such transient transformation methods include, but are not limited to, the introduction of the recombinase or active fragment or variant thereof directly, introduction of the recombinase mRNA, or using a non-integrative method, or introducing low levels of DNA into the plant. Such methods include, for example, microinjection, particle bombardment, viral vector systems, and/or precipitation of the polynucleotide wherein transcription occurs from the particle-bound DNA without substantive release from the particle or integration into the genome, such methods generally use particles coated with polyethylimine, (see, e.g., Crossway et al. (1986) Mol Gen Genet. 202:179-185; Nomura et al. (1986) Plant Sci 44:53-58; Hepler et al. (1994) Proc Natl Acad Sci USA 91:2176-2180 and Hush et al. (1994) J Cell Sci 107:775-784).

[0173] The transformed cells may be regenerated into plants using standard protocols and media, see, e.g., McCormick et al. (1986) Plant Cell Rep 5:81-84. These plants may then be grown and self-pollinated, backcrossed, and/or outcrossed, and the resulting progeny having the desired characteristic identified. Two or more generations may be grown to ensure that the characteristic is stably maintained and inherited and then seeds harvested. In this manner transformed/transgenic seed having the recited DNA construct stably incorporated into their genome are provided. A plant and/or a seed having stably incorporated the DNA construct can be further characterized for expression, site-specific integration potential, agronomics, and copy number (see, e.g., U.S. Pat. No. 6,187,994).

[0174] Fragments and variants of recombination sites, recombinases, selection markers, and nucleotide sequences of interest can be used, and unless otherwise stated, indicate that the variant or fragment retains at least some of the activity/function of the original composition. In instances where the polynucleotide encodes a protein, a fragment of a polynucleotide may encode protein fragments that retain the biological activity of the full-length protein. Fragments of a polynucleotide may range from at least about 20 nucleotides, about 50 nucleotides, about 100 nucleotides, and up to the full-length polynucleotide. A fragment of a polynucleotide that encodes a biologically active portion of a protein typically encodes at least 15, 25, 30, 50, 100, 150, 200, 250, 300, 325, 350, 375, 400, 420 or 450 contiguous amino acids, or any integer in this range up to and including the total number of amino acids present in a full-length protein. A biologically active fragment of a polypeptide can be prepared by isolating a portion of one of the polynucleotides encoding the portion of the polypeptide of interest, expressing the protein fragment, and assessing the activity.

[0175] Alternatively, a biologically active fragment of a polypeptide can be produced by selectively chemical or proteolytic cleaving of the full-length polypeptide, and the activity measured. For example, polynucleotides that encode fragments of a recombinase polypeptide can comprise nucleotide sequence comprising at least 16, 20, 50, 75, 100, 150, 200, 250, 300, 350, 400, 450, 500, 550, 600, 650, 700, 800, 900, 1,000, 1,100, 1,200, 1,300 or 1,400 nucleotides, or any integer in this range up to and including the total number of nucleotides of a full-length polynucleotide. In addition, fragments of a recombination site retain the biological activity of the recombination site, undergoing a recombination event in the presence of the appropriate recombinase. Fragments of a recombination site may range from at least about 5, 10, 15, 20, 25, 30, 35, 40 nucleotides, up to the full-length of a recombination site. For example, a full-length FRT, lox, attB, and attP sites are known and range from about 50 nucleotides to about 250 nucleotides, and fully active minimal are known and range from about 20, 25, 30, 35, 40, 45 and 50 nucleotides.

[0176] Assays to measure the biological activity of recombination sites and recombinases are known (see, e.g., Senecoll et al. (1988) J Mol Biol 201:406-421; Voziyanov et al. (2002) Nucl Acids Res 30:7; U.S. Pat. No. 6,187,994; WO01/00158; Albert et al. (1995) Plant J 7:649-659; Hartang et al. (1998) J Biol Chem 273:22884-22891; Saxena et al. (1997) Biochim Biophys Acta 1340:187-204; and Hartley et al. (1980) Nature 280-860-864). Assays for recombinase activity generally measure the overall activity of the enzyme on DNA substrates containing recombination sites. For example, to assay for FLP activity, inversion of a DNA sequence in a circular plasmid containing two inverted FRT sites can be detected as a change in position of restriction enzyme sites (see, e.g., Vetter et al. (1983) Proc Natl Acad Sci USA 80:7284). Alternatively, excision of DNA from a linear molecule or intermolecular recombination frequency induced by the enzyme may be assayed (see, e.g., Babineau et al. (1985) J Biol Chem 260:12313; Meyer-Leon et al. (1987) Nucl Acids Res 15:6469; and Gronostajski et al. (1985) J Biol Chem 260:12328). Recombinase activity may also be measured by excision of a sequence flanked by recombinogenic FRT sites to activate an assayable marker gene.

### EXAMPLES

[0177] The present invention is further defined in the following Examples, in which parts and percentages are by weight and degrees are Celsius, unless otherwise stated. It should be understood that these Examples, while indicating preferred embodiments of the invention, are given by way of illustration only. From the above discussion and these Examples, one skilled in the art can ascertain the essential characteristics of this invention, and without departing from the spirit and scope thereof, can make various changes and modifications of the invention to adapt it to various usages and conditions. Thus, various modifications of the invention in addition to those shown and described herein will be apparent to those skilled in the art from the foregoing description. Such modifications are also intended to fall within the scope of the appended claims.

[0178] The meaning of abbreviations is as follows: “sec” means second(s), “min” means minute(s), “h” means hour(s), “d” means day(s), “μl” means microliter(s), “mL” means milliliter(s), “L” means liter(s), “μM” means micromolar, “mM” means millimolar, “M” means molar, “mmol” means millimole(s), “pmole” mean micromole(s), “g” means gram(s), “μg” means microgram(s), “ng” means nanogram(s), “U” means unit(s), “bp” means base pair(s) and “kB” means kilobase(s).

### Example 1

### Identification and Isolation of Centromeres from Maize

[0179] To evaluate the size, composition, and structural organization of individual centromeres, labeled probes specific to a CentC, CentA, CRM1, and/or CRM2, were used individually and/or in a cocktail for fluorescent in situ hybridization (FISH) on maize meiotic pachytene, metaphase, anaphase I chromosomes and to extended DNA molecules (fiber-FISH). These four probes were also used for screening genomic maize BAC libraries.

### A. In Situ Hybridization

[0180] Multi-color FISH to maize metaphase chromosomes reveals that these four centromeric repeats are centromere-specific and co-localized in centromeric regions on all chromosomes in somatic cells. FISH analysis showed that the retrotransposons CRM1, CRM2, and CentA, occupy approximately the same region in maize centromeres. There is significant variation in repeat composition and relative size of repeat regions between centromeres of different maize chromosomes.

[0181] FISH results showed that the CentA probe had the weakest hybridization signal; the CRM1 probe showed a gradient-like hybridization pattern with the strongest signal around the primary constriction of the metaphase chromosome, with the signal gradually fading at the periphery of the centromere regions, and the CRM2 probe showed the most clear and compact hybridization signal. The strength of the FISH signal of the CentC repeats was highly dependent on the CentC copy number, which is variable between centromeres of different maize chromosomes. In some centromeres CentC is tightly clustered, showing slight overlap with the other centromeric repeats, in other chromosomes CentC repeat distribution shows more overlap with all other repeats. FISH of meiotic anaphase I chromosomes in microsporocytes with all four centromeric repeats revealed that the centromeric region at this stage is highly extended and only a small segment of the entire centromere region is actually attached to the kinetochore. All four repeats co-localized at the microtubule attachment segment, suggesting that a native functional centromere region comprises of all four centromeric repeats. Fiber-FISH on the extended DNA molecules was used to further characterize the distribution and arrangement of centromeric repeats at a higher resolution.

[0182] Oat by maize crosses generated F1 embryos that retained one or more maize chromosomes (see, e.g., Riera-Lizarazu et al. (1996) Theor Appl Genet. 93:123-135; Ananiev et al. (1997) Proc Natl Acad Sci USA 94:3524-3529). These lines provide a means to study individual maize chromosomes without the background complexities of the other nine maize chromosomes. A number of oat-maize addition lines are available from Ron Phillips at University of Minnesota (St. Paul, Minn., USA), including Seneca 60, A188, and B73 oat-maize addition lines used herein.

[0183] DNA from oat-maize chromosome addition lines were used for analysis of centromeric regions from individual maize chromosomes. Multicolor fiber-FISH on oat-maize chromosome addition lines revealed megabase-long hybridization stretches of centromeric repeats unique for each chromosome (FIG. 11). In chromosomes 1, 7 and 8 all four repeats were interspersed along the entire centromeric region. In other chromosomes, CentC was present as relatively short stretches (about 300 kb) flanked by “loose” arrays of the other three centromeric repeats. The overall length of the centromeric regions varied greatly between different maize chromosomes as observed by FISH. CentC revealed significant polymorphism between centromeres of individual chromosomes in the abundance of this repeat, with a difference of as much as 10 fold observed within any given genotype. Chromosome 7 had the largest blocks of CentC tandem repeats in metaphase and pachytene chromosomes. Similarly the oat-maize addition line with maize chromosome 7 had the longest stretches of DNA fibers which hybridize to CentC probe. Conversely, the centromere of maize chromosome 4 had the smallest block of CentC repeats in metaphase chromosomes and the smallest tracts of CentC in oat-maize chromosome 4 addition lines, especially in maize line B73 chromosome 4. When analyzed by fiber-FISH the centromeric retrotransposons CentA, CRM1, and CRM2 showed a dotted-like pattern with large gaps between positive hybridization signals. When probes to these three retrotransposons were mixed together and used as one cocktail probe they revealed more contiguously labeled DNA fibers interspersed with blocks of CentC repeats. The flanks of contiguously labeled centromeric retrotransposons showed a dotted-like pattern along the DNA molecules indicated that centromeric retrotransposons were interspersed with other types of DNA sequences, including non-centromere specific elements. The centromeric retrotransposons can form loose arrays up to 1 Mb in centromeres of chromosomes with small blocks of CentC repeats, such as chromosome 4. The maize hybrid Zapalote chico has a supernumary B-chromosome. FISH of Zapalote chico meiotic chromosomes indicated that the functional centromere of the maize B-chromosome contains all four centromeric repeats, similar to that observed in all the A-chromosomes. However, clusters of CentC repeats can be found also in several non-centromeric sites on the long arm of the B-chromosome. Those sites are apparently free from other centromeric repeats.

[0184] The results of FISH on mitotic and meiotic chromosomes, and fiber FISH suggested that the functional native centromeric segment responsible for the formation of the kinetochore on a maize chromosome generally comprises arrays of CentC tandem repeats intermixed with three other centromeric repeats, CRM1, CRM2 and CentA (FIG. 12).

### B. BAC Libraries

[0185] BAC vectors allow the cloning of large fragments of genomic DNA, up to about 300 kb in size, which can be maintained in a bacterial host, typically E. coli. A wide variety of BAC libraries have been generated from plant and animal species and made publicly available, see, for example, the information at Clemson University Genome Institute (CUGI; see, website at genome.clemson.edu) and Children's Hospital Oakland Research Institute (CHOR1; see, website at chori.org). Maize genomic BAC libraries representing greater than 13× coverage using multiple enzymes for library construction from two diverse maize genotypes, B73 and Mo17, representing the Dent and Lancaster heterotic groups respectively, were screened for maize centromeric sequences.

i. Maize Mo17 Genomic BAC Library

[0186] The pIndigoBac536 (Shizuya, unpublished) and pBeloBAC11 (Kim et al. (1996) Genomics 34:213-218) BAC cloning vectors were developed from pBAC108L (Shizuya et al. (1992) Proc Natl Acad Sci USA 89:8794-8797). The pBAC108L is a mini-F factor based plasmid. The F factor codes for genes that regulate its own replication and copy number in the cell. Vector pBeloBAC11 was generated by introducing the LacZ gene to facilitate recombinant clone identification by blue or colorless (white) phenotypes. pBeloBAC11 has three unique cloning sites: BamHI, SphI, and HindIII, which are flanked by the T7 and SP6 promoters. The rare-cutter restriction sites NotI, EagI, XmaI, SmaI, BglI, and SfiI can be used to excise the insert from pBeloBAC11. In vector pIndigoBac536, an EcoRI site has been modified in the chloramphenicol (CMR) gene so that the EcoRI site in the cloning site can be used for library construction. The pBeloBAC11 and plndigoBac536 vectors have two selection markers, LacZ and CM^{R} for transformant selection.

[0187] A proprietary maize genomic BAC library from maize Mo17 public inbred line was constructed in pBeloBAC11 or pIndigoBac536 essentially as described in Kim et al. ((1996) Genomics 34:213-218) under contract with the Shizuya laboratory at the California Institute of Technology. Briefly, Mo17 genomic DNA was partially digested with HindIII or EcoRI restriction enzymes. The DNA fragments were size fractionated in agarose gel and cloned in pBeloBAC11 HindIII sites or pIndigoBac536 EcoRI sites. The average insert size was about 150 kb. The entire Mo17 genomic BAC library consists of 433 384-well plates or 166,272 total BAC clones. The first half of the library comprising 214 plates contains BAC clones with HindIII inserts, while the second half of the library comprising 219 plates, contains BAC clones with EcoRI inserts. The BAC clones are maintained in E. coli DH10B (BRL Life Technologies).

ii. Maize B73 Genomic BAC Libraries

[0188] Two public maize B73 genomic BAC libraries were obtained. Library ZMMBBb is available from Clemson University Genome Institute (CUGI, University of Georgia, Athens, Ga., USA). The ZMMBBb BAC library was created at CUGI by cloning HindIII partially digested maize B73 genomic DNA into the plndigoBac536 vector comprising a chloramphenicol (CMR) resistance gene. The ZMMBBb BAC library comprises 247,680 total BAC clones with an average insert size of about 137 kb, representing a 14× genomic coverage. The second B73 BAC library, CHORI-201 (ZMMBBc) created by Pieter de Jong's laboratory at Children's Hospital Oakland Research Institute (CHOR1), is available from the BACPAC Resource Center at CHORI. To construct this library, genomic DNA was isolated from maize B73 nuclei. The first segment of the library was constructed using DNA partially digested with a combination of EcoRI and EcoRI methylase, the second segment was constructed using MboI partially digested DNA. Size selected DNA was cloned into the pTARBAC2.1 vector (segment 1, plates 1-288) between the EcoRI sites and into the pTARBAC1.3 vector (segment 2, plates 289-576) between the BamHI sites. The ligation products were transformed into E. coli DH10B electrocompetent cells (BRL Life Technologies). The BAC clones for each library segment in each vector have been arrayed into 288 384-well microtiter dishes. Segment 1 comprises 106,637 individual BAC clones with an average insert size of 163 kb, representing a 6.9× genomic coverage. Segment 2 comprises 105,579 individual BAC clones with an average insert size of 167 kb, representing a 7.0× genomic coverage. The total ZMMBBc library comprises 212,216 individual BAC clones with an average insert size of 165 kb, representing a 13.9× genomic coverage.

### C. BAC Library Screening

[0189] Maize B73 and Mo17 BAC libraries were screened with four separate probes to centromeric sequences CentA, CentC, CRM1, and CRM2. The probes were designed as OVERGO oligonucleotides 40 bp long and were unique to each centromere element. By using appropriate labels, these probes can be used for colony, and blot hybridization, and FISH and fiber-FISH.

i. Overgo Probes

[0190] Overgo probes are typically designed as two short oligonucleotides which have an 8 bp complementary overlapping region. The short oligonucleotides are typically in the range of 23-28 bp, with 24 bp being most commonly used. After annealing, the oligonucleotides form dimers with 16 bp single-stranded DNA on both sides. The partially double-stranded probe is labeled by filling the recessed 3′ termini using polymerization activity of the Klenow enzyme in the presence of labeled nucleotides. The final overgo probe comprises a labeled double-stranded 40 bp probe. TABLE 1 lists primers and probes used for generating, screening, and characterization of BAC clones, DNA constructs, and maize minichromosome events.

TABLE 1

| | | | |
|---|---|---|---|
| SEQ | | | |
| ID | Biocode | Oligo Name | Sequence |

| | | | |
|---|---|---|---|
| 5 | | PCR-Telomere-F | AGGGTTTAGGGTTTAGGGTTTAGGGTTTAGGG |
| 6 | | PCR-Telomere-R | CCCTAAACCCTAAACCCTAAACCCTAAACC |
| 7 | 65644 | CentC-OVG-1-40f | GGTTCCGGTGGCAAAAACTCGTGC |
| 8 | 65645 | CentC-OVG-1-40r | TGTCGGTGCATACAAAGCACGAGT |
| 9 | 65646 | CentC-OVG-51-90f | GAATGGGTGACGTGCGACAACGAA |
| 10 | 65647 | CentC-OVG-51-90r | GGTGGTTTCTCGCAATTTCGTTGT |
| 11 | 65648 | CentC-OVG-101-140f | GTTTTGGACCTAAAGTAGTGGATT |
| 12 | 104790 | CentC-OVG-101-140r | CACAACGAACATGCCCAATCCACT |
| 13 | 69509 | CRM1-LTR-OVG1f | CTTGGTCTTGGACAGTACCTCACT |
| 14 | 69510 | CRM1-LTR-OVG2f | CCCTTGCGATCCGACTACGACGAG |
| 15 | 69511 | CRM1-LTR-OVG3f | TCACGAAGATCGTTTCCTGTGCGC |
| 16 | 69512 | CRM1-LTR-OVG4f | CAGCGCAGATTAGCGCGTGTTCGA |
| 17 | 69513 | CRM1-LTR-OVG5f | CCAACCCTAGGTCGTCCATTATGG |
| 18 | 69514 | CRM1-LTR-OVG6f | TTCAATTCTCTTGCACGGGCCCGA |
| 19 | 69515 | CRM1-LTR-OVG1r | TCAGGTCTACTTCATCAGTGAGGT |
| 20 | 69516 | CRM1-LTR-OVG2r | TGGCGCCTCGGGCTTGCTCGTCGT |
| 21 | 69517 | CRM1-LTR-OVG3r | TGTTCGTTCTTCGATTGCGCACAG |
| 22 | 69518 | CRM1-LTR-OVG4r | TTAGCCTTAGCTACTCTCGAACAC |
| 23 | 69519 | CRM1-LTR-OVG5r | CCAGCCCAATTGCGGCCCATAATG |
| 24 | 69520 | CRM1-LTR-OVG6r | CACCTGGGCCAGTGACTCGGGCCC |
| 25 | 69521 | CRM2-LTR-OVG1f | TGATGAAGACATCCACACTACTGA |
| 26 | 69522 | CRM2-LTR-OVG2f | TTGAACATGCTGGATTCGGACTGC |
| 27 | 69523 | CRM2-LTR-OVG3f | CTGCCCATGGTGCTGCGTCACCCT |
| 28 | 69524 | CRM2-LTR-OVG4f | GCGCGTGCTAGTTCAGCCGCCCGT |
| 29 | 69525 | CRM2-LTR-OVG5f | GTATCGGTTGCTAAGGCGCAGCGT |
| 30 | 69526 | CRM2-LTR-OVG1r | TATTGGTATAGATGCATCAGTAGT |
| 31 | 69527 | CRM2-LTR-OVG2r | AAGTTGGTGTTCTTCTGCAGTCCG |
| 32 | 69528 | CRM2-LTR-OVG3r | CCCATTGGGCCAAAATAGGGTGACG |
| 33 | 69529 | CRM2-LTR-OVG4r | TTCCGAAGACAAGAAGACGGGCGG |
| 34 | 69530 | CRM2-LTR-OVG5r | CTACAGCCTTCCAAAGACGCTGCG |
| 35 | 69531 | CentA-LTR-OVG1f | TGATGAGAACATAACCCGCACAGA |
| 36 | 69532 | CentA-LTR-OVG2f | AGGATGATGAGGACATCACTGCCA |
| 37 | 69533 | CentA-LTR-OVG3f | AACCATCTAGAATTTGAGAAGGCA |
| 38 | 69534 | CentA-LTR-OVG4f | GTCCAGAAACTGCCGAGTGAACTC |
| 39 | 65535 | CentA-LTR-OVG5f | GAGAGAGTTTCGTTCTCCATTAGA |
| 40 | 69536 | CentA-LTR-OVG6f | GTTCTTGCTTGTTCTCGATTGCTT |
| 41 | 69537 | CentA-LTR-OVG7f | TTGGTTGTGGTAGTCGGGCAGCCA |
| 42 | 69538 | CentA-LTR-OVG1r | CATTAACATGGTCATATCTGTGCG |
| 43 | 69539 | CentA-LTR-OVG2r | TGGTGTGGTGTATTGATGGCAGTG |
| 44 | 69540 | CentA-LTR-OVG3r | CTTTTATTGCCTTGTTGCCTTCT |
| 45 | 69541 | CentA-LTR-OVG4r | GACTTGGGTAGAGCAGGAGTTCAC |
| 46 | 69542 | CentA-LTR-OVG5r | AGGAATAGAAAGGAGTTCTAATGG |
| 47 | 69543 | CentA-LTR-OVG6r | ACAGCCTTGAACCTGCAAGCAATC |
| 48 | 69544 | CentA-LTR-OVG7r | TGTTGGAGAACGACGTTGGCTGCC |
| 49 | 69555 | Cent4-250-OVG1f | TAAGTGCAAACCATTGTTAAATTT |
| 50 | 69556 | Cent4-250-OVG2f | CACAAACCCTTAACTCGAAACTAT |
| 51 | 69557 | Cent4-250-OVG3f | ATCGAAAGATAACTCATATGGCTT |
| 52 | 69558 | Cent4-250-OVG4f | TCCACTAAAGAACCAAGATTGTGA |
| 53 | 69559 | Cent4-250-OVG1r | AATTGTACTATCTCTAAAATTTAA |
| 54 | 69560 | Cent4-250-OVG2r | TTTAGGGTTTGGGGTTATAGTTTC |
| 55 | 69561 | Cent4-250-OVG3r | GACCATAATGGTCAAAAAGCCATA |
| 56 | 69562 | Cent4-250-OVG4r | ATATGTTGGACACAAATCACAATC |
| 57 | 69634 | 18-26SrDNANTS- | CCGGAAATAAGCAAAGTCCAAGCG |
| | | OvG1f | |
| 58 | 69635 | 18-26SrDNANTS- | TATGTCTTGGGTGAAGGGCATGGC |
| | | OvG2f | |
| 59 | 69636 | 18-26SrDNANTS- | CGCAAGGCGACGGGCGGCATGGCT |
| | | OvG3f | |
| 60 | 69637 | 18-26SrDNANTS- | CGAGGGGTTCCCCATGGCGCACGG |
| | | OvG4f | |
| 61 | 69638 | 18-26SrDNANTS- | TCGGTGTCTTTCCACACGCTTGGA |
| | | OvG1r | |
| 62 | 69639 | 18-26SrDNANTS- | GTTTTCCCTCCGTTCCGCCATGCC |
| | | OvG2r | |
| 63 | 69640 | 18-26SrDNANTS- | AGACGCAAGGCCGAACAGCCATGC |
| | | OvG3r | |
| 64 | 69641 | 18-26SrDNANTS- | GGCCTCAGTTTTCGGCCCGTGCGC |
| | | OvG4r | |
| 65 | 74794 | subtelo-TR430-OvG2f | GACACATGTTTTTGTCGTCGAACA |
| 66 | 74795 | subtelo-TR430-OvG2r | GGAGGCACGAAATCGCTGTTCGAC |
| 67 | 74796 | subtelo-TR430-OvG3f | CGACCGCCACCCATGATTTGACCA |
| 68 | 74797 | subtelo-TR430-OvG3r | ACCTTACCAGTCTCTATGGTCAAA |
| 69 | 74799 | subtelo-TR430-OvG4f | TCCCGTGAGCTATAGCACACGTTT |
| 70 | 74800 | subtelo-TR430-OvG4r | GGTCGCTCGGCCATGAAAACGTGT |
| 71 | 74801 | subtelo-TR430-OvG5f | CCGTGTTCCTCCACACGTGTTTTT |
| 72 | 74802 | subtelo-TR430-OvG5r | AAGGTGCTCCGGGGACAAAAACAC |
| 73 | 74803 | subtelo-TR430-OvG6f | TTGGCCTCCCGCGAGCTATATCAC |
| 74 | 74804 | subtelo-TR430-OvG6r | TTGGCCACGGAAATGTGTGATATA |
| 75 | 74805 | subtelo-TR430-OvG7f | TTATGTATCCGACCTGCCACCTTC |
| 76 | 74806 | subtelo-TR430-OvG7r | CTCCCCGGTCTAAAACGAAGGTGG |
| 77 | 74807 | subtelo-TR430-OvG8f | GCCACCCGTGAGCTATAGCACACG |
| 78 | 74808 | subtelo-TR430-OvG8r | TAGGTTTCCATAAAATCGTGTGCT |
| 79 | 65650 | 180knobOvG21-60f | TGTCGAAAATAGCCATGAACGACC |
| 80 | 65651 | 180knobOvG21-60r | CGGTATTATTGGAAATGGTCGTTC |
| 81 | 65652 | 180knobOvG71-110f | CCTACGGATTTTTGACCAAGAAAT |
| 82 | 65653 | 180knobOvG71-110r | ATTTCTAGTGGAGACCATTTCTTG |
| 83 | 65654 | 180knobOvG141-180f | ATGTGGGGTGAGGTGTATGAGCCT |
| 84 | 65655 | 180knobOvG141-180r | ATGAGCCTCTGGTCGATGATCAAT |
| 85 | 65656 | 5SrDNAOvG1-40f | GGATGCGATCATACCAGCACTAAA |
| 86 | 65657 | 5SrDNAOvG1-40r | TGATGGGATCCGGTGCTTTAGTGC |
| 87 | 65658 | 5SrDNAOvG61-100f | CTTGGGCGAGAGTAGTACTAGGAT |
| 88 | 65659 | 5SrDNAOvG61-100r | TCCCAGGAGGTCACCCATCCTAGT |
| 89 | 65660 | 5SrDNAOvG161-200f | ACCATAGTAAAAATGGGTGACCGT |
| 90 | 65661 | 5SrDNAOvG161-200r | TAATTTAACACGAGAACGGTCAC |
| 91 | 65662 | 5SrDNAOvG261-230f | CCGTGGGCGAGCCGAGCACGGAGG |
| 92 | 65663 | 5SrDNAOvG261-230r | TCCTCTTATGCCCACACCTCCGTG |
| 93 | 65664 | 350knobOvG31-70f | CTCAAATGACGTTTCTATGATATT |
| 94 | 65665 | 350knobOvG31-70r | TGAATACAATGCCCTCAATATCAT |
| 95 | 65666 | 350knobOvG121-160f | CTAGGTTTCCTATAATCCCCTCTA |
| 96 | 65667 | 350knobOvG121-160r | CTAGGTATGCCTTGAATAGAGGG |
| 97 | 65668 | 350knobOvG161-200f | ATGTTGTTTATGTCCACTCAAGTA |
| 98 | 65669 | 350knobOvG161-200r | ATGGTGTACGGTGTTTTACTTGAG |
| 99 | 65670 | 350knobOvG261-300f | GTGAGATCTGTCCAAACATAGGTT |
| 100 | 65671 | 350knobOvG261-300r | GGTGCCTTACAACCGTAACCTATG |
| 101 | | b010.m7 fis31 | GCAAACTTTATGTGATCCCTTCCTCGCTGAACGAG |
| | | | ATGAG |
| 102 | | b108.h15 fis47 | GGGACGGCAAGTCACGGTAAGACCAGTCCAACC |
| | | | GAATGAT |
| 103 | | Cen3n.pk0001.g11 | CCAAACTTGCTGAGATTACTGGGCAATCTGTTCGC |
| | | | TCGCA |
| 104 | 103022 | 23715-3101-3200f | CCAGGTAGTTTGAAACAGTATTCT |
| 105 | 103023 | 23715-3501-3600f | ATAAAGGAAAAGGGCAAACCAAAC |
| 106 | 103024 | 23715-1401-1500f | GATGCCCACATTATAGTGATTAGC |
| 107 | 103025 | 23715-2901-3000f | CCACATATAGCTGCTGCATATGCC |
| 108 | 103026 | 23715-3701-3800f | CGGATCTAACACAAACATGAACAG |
| 109 | 103027 | 23715-1-100f | CGATGAATTTTCTCGGGTGTTCTC |
| 110 | 103028 | 23715-101-200f | CCTGCAGCCCTAATAATTCAGAAG |
| 111 | 103029 | 23715-301-400f | CACAGTCGATGAATCCAGAAAAGC |
| 112 | 103030 | 23715-901-1000f | GCGTGCAATCCATCTTGTTCAATC |
| 113 | 103031 | 23715-3201-3300f | CAACCACACCACATCATCACAACC |
| 114 | 103032 | 23715-3601-3700f | ACTGGCAAGTTAGCAATCAGAACG |
| 115 | 103033 | 23715-4901-5000f | CATGAACGTGTCTTCAACTAGAGG |
| 116 | 103034 | 23715-4201-4300f | GACGGCGTTTAACAGGCTGGCATT |
| 117 | 103035 | 23715-201-300f | CCAAGCTCTTCAGCAATATCACGG |
| 118 | 103036 | 23715-601-700f | ATACTTTCTCGGCAGGAGCAAGGT |
| 119 | 103037 | 23715-1001-1100f | ATCCTTGGCGGCAAGAAAGCCATC |
| 120 | 103038 | 23715-1101-1200f | GCAAGCTACCTGCTTTCTCTTTGC |
| 121 | 103039 | 23715-1601-1700f | GCTTCTTGGCCATGTAGATGGACT |
| 122 | 103040 | 23715-1801-1900f | TTCACGCCGATGAACTTCACCTTG |
| 123 | 103041 | 23715-5001-5087f | AAGCTTGCCAACGACTACGCACTA |
| 124 | 103042 | 23715-401-500f | CCCTGATGCTCTTCGTCCAGATCA |
| 125 | 103043 | 23715-801-900f | AGAGCAGCCGATTGTCTGTTGTGC |
| 126 | 103044 | 23715-1301-1400f | CAGGATCCCGTAACTATAACGGTC |
| 127 | 103045 | 23715-2801-2900f | CGACCTGCAGAAGTAACACCAAAC |
| 128 | 103046 | 23715-3401-3500f | ATCTAGAACGACCGCCCAACCAGA |
| 129 | 103047 | 23715-3801-3900f | ATTTGGGGGAGATCTGGTTGTGTG |
| 130 | 103048 | 23715-3901-4000f | GAGGGGGTGTCTATTTATTACGGC |
| 131 | 103049 | 23715-4801-4900f | CATGCAAGCTGATCTGAGCTTGGC |
| 132 | 103050 | 23715-2101-2200f | TCCATGCGCACCTTGAAGCGCATG |
| 133 | 103051 | 23715-501-600f | TTCCATCCGAGTACGTGCTCGCTC |
| 134 | 103052 | 23715-1201-1300f | ATCCACTAGTAACGGCCGCCAGTG |
| 135 | 103053 | 23715-4001-4100f | GCCACGCAATTTCTGGATGCCGAC |
| 136 | 103054 | 23715-701-800f | CGATAGCCGCGCTGCCTCGTCTTG |
| 137 | 103055 | 23715-1901-2000f | CACTTGAAGCCCTCGGGGAAGGAC |
| 138 | 103056 | 23715-1701-1800f | TCCTTCAGCTTCAGGGCCTTGTGG |
| 139 | 103057 | 23715-2001-2100f | CACCTTGGAGCCGTACTGGAACTG |
| 140 | 103058 | 23715-2601-2700f | TGCGGCTCGGTGCGGAAGTTCACG |
| 141 | 103059 | 23715-4101-4200f | ACGCGACGCTGCTGGTTCGCTGGT |
| 142 | 103060 | 23715-3101-3200r | CGTTCTAGATCGGAGTAGAATACT |
| 143 | 103061 | 23715-3501-3600r | TGTTTCGTTGCATAGGGTTTGGTT |
| 144 | 33332 | 23715-1401-1500r | GCACACATAGTGACATGCTAATCA |
| 145 | 103062 | 23715-2901-3000r | GATATACTTGGATGATGGCATATG |
| 146 | 103063 | 23715-3701-3800r | CCCGGTAGTTCTACTTCTGTTCAT |
| 147 | 103064 | 23715-1-100r | ATTCGAGCCAATATGCGAGAACAC |
| 148 | 103065 | 23715-101-200r | GCCTTCTTGACGAGTTCTTCTGAA |
| 149 | 103066 | 23715-301-400r | ATGGTGGAAAATGGCCGCTTTTCT |
| 150 | 103067 | 23715-901-1000r | GAGGATCGTTTCGCATGATTGAAC |
| 151 | 103068 | 23715-3201-3300r | TGCTTTTTGTTCGCTTGGTTGTGA |
| 152 | 103069 | 23715-3601-3700r | ACCTGTACGTCAGACACGTTCTGA |
| 153 | 103070 | 23715-4901-5000r | AATTAAGTCAGGCGCGCCTCTAGT |
| 154 | 103071 | 23715-4201-4300r | CTTGTTTCGAGTAGATAATGCCAG |
| 155 | 103072 | 23715-201-300r | ACATAGCGTTGGCTACCCGTGATA |
| 156 | 103073 | 23715-601-700r | GATCTCCTGTCATCTCACCTTGCT |
| 157 | 103074 | 23715-1001-1100r | CCTGCAAAGTAAACTGGATGGCTT |
| 158 | 103075 | 23715-1101-1200r | AAGGGAAAACGCAAGCGCAAAGAG |
| 159 | 103076 | 23715-1601-1700r | TACCTGGTGGAGTTCAAGTCCATC |
| 160 | 103077 | 23715-1801-1900r | ACGGCTGCTTCATCTACAAGGTGA |
| 161 | 103078 | 23715-5001-5087r | TGAAGCTCTTGTTGGCTAGTGCGT |
| 162 | 103079 | 23715-401-500r | GTCTTGTCGATCAGGATGATCTGG |
| 163 | 103080 | 23715-801-900r | ATTCGGCTATGACTGGGCACAACA |
| 164 | 103081 | 23715-1301-1400r | CGCTTCGCTACCTTAGGACCGTTA |
| 165 | 103082 | 23715-2801-2900r | CGATGCTCACCCTGTTGTTTGGTG |
| 166 | 88245 | 23715-3401-3500r | GGTTGTGATGATGTGGTCTGGTTG |
| 167 | 103083 | 23715-3801-3900r | GTTCGGAGCGCACACACACACAAC |
| 168 | 103084 | 23715-3901-4000r | TTTCCCTTCCTCGCCCGCCGTAAT |
| 169 | 103085 | 23715-4801-4900r | TAAAACGACGGCCAGTGCCAAGCT |
| 170 | 103086 | 23715-2101-2200r | ACGTCATCACCGAGTTCATGCGCT |
| 171 | 103087 | 23715-501-600r | AGCGAAACATCGCATCGAGCGAGC |
| 172 | 103088 | 23715-1201-1300r | AAGCCGAATTCCAGCACACTGGCG |
| 173 | 103089 | 23715-4001-4100r | TTGGACTTGCTCCGCTGTCGGCAT |
| 174 | 103090 | 23715-701-800r | TGCCCTGAATGAACTGCAAGACGA |
| 175 | 103091 | 23715-1901-2000r | CCGACTACAAGAAGCTGTCCTTCC |
| 176 | 103092 | 23715-1701-1800r | TGCTGAAGGGCGAGACCCACAAGG |
| 177 | 103093 | 23715-2001-2100r | GGACATCCTGTCCCCCCAGTTCCA |
| 178 | 103094 | 23715-2601-2700r | ACATCGAGACCTCCACCGTGAACT |
| 179 | 103095 | 23715-4101-4200r | AGTCTAACGGACACCAACCAGCGA |
| 180 | | PCRbacmpk108h15f | GATCGTCGAATGGGAATCCATGGG |
| 181 | | PCRbacmpk108h15r | CCCTGAGTGAACCATTTAGGAAGATCAG |
| 182 | | PCRbacmpk108h15- | TGCAACATCCAAAGACCCAACATG |
| | | 2.fis47f | |
| 183 | | PCRbacmpk108h15- | TTCCAACATGGTTGGTGGTCAG |
| | | 2.fis47r | |
| 184 | | PCRbacmpk010m07fis | TGTCATGACATCTTGTTGCTACCCTG |
| | | 31f | |
| 185 | | PCRbacmpk010m07fis | AAACCCGGAGTTTCTATGCAGG |
| | | 31r | |
| 192 | 75319 | Telo-31overgo | AGGGTTTAGGGTTTAGGGTTTAGGGTTTAGGG |
| | | primer1 | |
| 193 | 39612 | Telo-31overgo | CCCTAAACCCTAAACCCTAAACCCTAAACCC |
| | | primer2 | |

ii. BAC Library Screening Results

[0191] Colony hybridization screening identified a pool of approximately 8000 BAC clones which hybridized to at least one of the four centromere-specific probes. The 8000 BAC clones were classified into 4 groups based on their hybridization profile (Table 2).

TABLE 2

| Group | Total |
|---|---|
| All BACs containing CentA | 842 |
| All BACs containing CentC | 2479 |
| All BACs containing CRM2 | 2968 |
| All BACs containing CRM1 | 6012 |

[0192] Based on centromeric repeat composition the BAC clones were further classified into 15 sets based on the combination of probes which hybridized to each particular BAC clone (Table 3).

TABLE 3

| | # of |
|---|---|
| Group | BACs |
| BACs containing CentA & CentC & CRM1 & CRM2 | 247 |
| BACs containing CentA & CentC & CRM2; not CRM1 | 6 |
| BACs containing CentA & CentC & CRM1; not CRM2 | 45 |
| BACs containing CentA & CRM1 & CRM2; not CentC | 116 |
| BACs containing CentC & CRM1 & CRM2; not CentA | 730 |
| BACs containing CentA & CentC; not CRM1 not CRM2 | 4 |
| BACs containing CentA & CRM1; not CentC not CRM2 | 131 |
| BACs containing CentA & CRM2; not CentC not CRM1 | 27 |
| BACs containing CentC & CRM2; not CentA not CRM1 | 97 |
| BACs containing CentC & CRM1; not CentA not CRM2 | 829 |
| BACs containing CRM1 & CRM2; not CentA not CentC | 749 |
| BACs containing CentC; not CentA not CRM1 not CRM2 | 521 |
| BACs containing CRM2; not CentA not CentC not CRM1 | 966 |
| BACs containing CRM1; not CentA not CentC not CRM2 | 3165 |
| BACs containing CentA; not CentC not CRM1 not CRM2 | 266 |

[0193] The BAC clones were further classified based on the summation of BAC clones which hybridized to each particular probe (Table 4).

TABLE 4

| | |
|---|---|
| All BACs containing CentA | 842 |
| All BACs containing CentA & CentC | 302 |
| All BACs containing CentA, CentC, & CRM1 | 292 |
| All BACs containing CentA, CentC, & CRM2 | 253 |
| All BACs containing CentA & CRM1 | 539 |
| All BACs containing CentA, CRM1, & CRM2 | 363 |
| All BACs containing CentA & CRM2 | 396 |
| All BACs containing CentA, CentC, CRM1, & CRM2 | 247 |
| All BACs containing CentC | 2479 |
| All BACs containing CentC & CRM1 | 1851 |
| All BACs containing CentC & CRM2 | 1080 |
| All BACs containing CentC, CRM1, & CRM2 | 977 |
| All BACs containing CRM1 | 6012 |
| All BACs containing CRM1 & CRM2 | 1842 |
| All BACs containing CRM2 | 2968 |

[0194] One group of 247 BAC clones contains all four centromeric repeats. They comprise 0.15% of maize genome or can be present on a segment of DNA about 300 kb per centromere on average. This group of BAC clones was identified as the core set to be used first in experiments to construct a maize minichromosome. DNA was purified from all 247 BACs in the core set, digested with XmnI or RsaI, blotted and hybridized with each of the four centromeric repeats. Southern blot hybridization, confirmed that clones in this core set contained all four centromeric repeats. The BACs showed general differences in restriction fragment composition and hybridization patterns, and were further classified into 87 groups on the basis of restriction fragment similarities. One representative from each of the 87 groups (Table 5) was taken to generate core set DNA constructs and/or pools of BAC core set constructs for transformation and minichromosome assembly.

TABLE 5

| | | Insert |
|---|---|---|
| No. | Name | (kb) |
| 1 | bacm.pk101.n23 | 50 |
| 2 | bacm2.pk064.e15 | 50 |
| 3 | bacm.pk036.e13 | 60 |
| 4 | bacm2.pk179.e1 | 70 |
| 5 | bacm.pk030.a6 | 70 |
| 6 | bacm2.pk179.b18 | 75 |
| 7 | bacm.pk133.b11 | 75 |
| 8 | bacm2.pk066.m12 | 80 |
| 9 | bacm.pk119.a23 | 80 |
| 10 | bacm.pk098.h2 | 85 |
| 11 | bacm2.pk174.e4 | 90 |
| 12 | bacm2.pk116.g16 | 90 |
| 13 | bacm2.pk023.e24 | 90 |
| 14 | bacm.pk178.c10 | 90 |
| 15 | bacm.pk135.l6 | 90 |
| 16 | bacm.pk098.f3 | 90 |
| 17 | bacm.pk075.l6 | 90 |
| 18 | bacm.pk066.j14 | 95 |
| 19 | bacm2.pk099.m24 | 100 |
| 20 | bacm2.pk093.h11 | 100 |
| 21 | bacm2.pk083.a2 | 100 |
| 22 | bacm.pk179.d4 | 100 |
| 23 | bacm.pk076.m3 | 100 |
| 24 | bacm.pk070.h17 | 100 |
| 25 | bacm.pk064.n1 | 100 |
| 26 | bacm.pk011.l8 | 100 |
| 27 | bacm.pk068.p16 | 105 |
| 28 | bacm.pk012.n20 | 105 |
| 29 | bacm.pk077.k5 | 110 |
| 30 | bacm2.pk053.g23 | 110 |
| 31 | bacm2.pk034.j8 | 110 |
| 32 | bacm.pk164.b11 | 110 |
| 33 | bacm.pk062.c14 | 110 |
| 34 | bacm.pk013.m8 | 110 |
| 35 | bacm.pk056.j19 | 110 |
| 36 | bacm.pk051.g11 | 115 |
| 37 | bacm2.pk179.o14 | 120 |
| 38 | bacm2.pk096.d23 | 120 |
| 39 | bacm2.pk070.g7 | 120 |
| 40 | bacm2.pk034.g20 | 120 |
| 41 | bacm2.pk012.g19 | 120 |
| 42 | bacm2.pk115.o22 | 125 |
| 43 | bacm2.pk094.f14 | 125 |
| 44 | bacm2.pk003.g6 | 125 |
| 45 | bacm2.pk002.g7 | 125 |
| 46 | bacm.pk135.l7 | 125 |
| 47 | bacm.pk090.o5 | 125 |
| 48 | bacm2.pk100.j24 | 130 |
| 49 | bacm2.pk013.c9 | 130 |
| 50 | bacm.pk166.n7 | 130 |
| 51 | bacm.pk043.o23 | 130 |
| 52 | bacm.pk001.n1 | 130 |
| 53 | bacm.pk106.j20 | 135 |
| 54 | bacm.pk015.d19 | 135 |
| 55 | bacm.pk007.a2 | 140 |
| 56 | bacm.pk148.e2 | 140 |
| 57 | bacm.pk141.j4 | 140 |
| 58 | bacm.pk138.e14 | 140 |
| 59 | bacm.pk135.j2 | 140 |
| 60 | bacm.pk134.f15 | 140 |
| 61 | bacm.pk085.k5 | 140 |
| 62 | bacm.pk077.b21 | 140 |
| 63 | bacm.pk124.j24 | 145 |
| 64 | bacm.pk023.i5 | 145 |
| 65 | bacm.pk039.m16 | 150 |
| 66 | bacm2.pk169.a21 | 150 |
| 67 | bacm2.pk130.e20 | 150 |
| 68 | bacm.pk156.i17 | 150 |
| 69 | bacm.pk143.m18 | 150 |
| 70 | bacm.pk112.p1 | 150 |
| 71 | bacm.pk102.i4 | 150 |
| 72 | bacm.pk087.m4 | 150 |
| 73 | bacm.pk079.m11 | 150 |
| 74 | bacm.pk041.e16 | 150 |
| 75 | bacm.pk129.a4 | 150 |
| 76 | bacm.pk164.e18 | 155 |
| 77 | bacm.pk161.h1 | 155 |
| 78 | bacm.pk089.l8 | 155 |
| 79 | bacm.pk076.o15 | 160 |
| 80 | bacm.pk039.a3 | 160 |
| 81 | bacm.pk019.h24 | 160 |
| 82 | bacm2.pk158.f12 | 160 |
| 83 | bacm2.pk075.n6 | 170 |
| 84 | bacm2.pk137.f2 | 175 |
| 85 | bacm.pk093.d8 | 175 |
| 86 | bacm.pk133.b10 | 180 |
| 87 | bacm.pk1 78.o20 | 180 |

### D. Identification of Inverted Arrays of CentC Repeats

[0195] BAC libraries from maize lines Mo17 and B73 were searched for inverted CentC tandem arrays. A BLAST search of a Mo17 BAC-end sequence database revealed 591 BAC ends containing CentC repeats. Of these, only 45 BAC clones contained CentC repeats on both ends, and 44 BACs had CentC repeats in the same orientation, with only one BAC having CentC repeats in an inverted orientation (bacm.pk128.j21). A second BAC clone, bacm.pk008.d20 having CentC repeats in an inverted orientation was found by Southern hybridization analysis. The Southern analysis of this clone showed a hybridization pattern very similar to the pattern observed for bacm.pk128.j21. A BLAST search of the public B73 BAC-end sequence database revealed 136 BAC ends containing CentC repeats. Of these, only 5 BAC clones contained CentC repeats on both ends, and 4 BACs had CentC repeats in the same orientation, with only one BAC having CentC repeats in inverted orientation (ZMMBBb0243L15, 150 kb insertion). The DNA of bacm.pk128.j21 (80 kb insertion) and bacm.pk008.d20 were digested with XmnI restriction enzyme, which cleaves CentC repeats into short monomeric or dimeric fragments. A 10 kb XmnI fragment was isolated, subcloned and sequenced. The sequence analysis showed that one full copy plus one partial copy of the CRM1 element (SEQ ID NO: 191) is located between two inverted CentC repeats.

E. Isolation of Centromeric BAC Clones from Maize Chromosome 4

[0196] Maize chromosome 4 contains the shortest CentC repeat arrays. These arrays are present in a single stretch of DNA of approximately 300 kb as estimated by fiber-FISH. This segment may contain the core functional centromeric DNA sequences, and could potentially be represented by 2-4 overlapping BAC clones. Chromosome 4-specific centromeric BAC clones can be identified by finding unique DNA sequences located in the chromosome 4 centromeric region.

[0197] The maize Mo17 genomic BAC library, comprising 10,965 BAC end sequences was analyzed to identify unique BAC end sequences represented only once in the library. Eighty-one unique BAC end sequences were identified and selected for further characterization. A pair of PCR primers was designed to each of the 81 unique BAC end sequences for mapping on the oat-maize chromosome addition line panel and each unique sequence assigned to an individual maize chromosome.

[0198] The BAC end sequence of bacm.pk108.h15 (170 kb) from Mo17 was mapped to chromosome 4. This BAC was sequenced and 6 unique sequences, as well as all four centromeric repeats CentA, CentC, CRM1 and CRM2 were found. Using PCR, this BAC was assigned to a contig containing several BACs which also hybridize to CentC. Sequencing confirmed that two more BAC clones from this contig, bacm.pk010.m7 (170 kb), and bacm.pk184.c21 (150 kb) partially overlap with bacm.pk108.h15 and share some unique markers. Three unique DNA sequences were identified within these three BAC clones and their chromosome 4 localization was confirmed by PCR on oat-maize addition line DNA. Corresponding overgo probes (SEQ ID NOS: 102-104 in Table 1) were developed and used for screening of a B73 public BAC library.

[0199] Seven BAC clones from the B73 BAC library were selected based on hybridization to all three chromosome 4 specific probes. DNA from these BAC clones was digested with XmnI, transferred to a membrane and hybridized with all four centromeric repeat probes. Four of the selected B73 BAC clones contain CentC, CRM1, and CRM2 centromere repetitive elements: bacb.0424.d20 (150 kb); bacb.0155.h15 (175 kb); bacc.0048.g5 (170 kb); and bacc.0237.m8 (125 kb). Another three B73 BAC clones contain only CRM1 and CRM2 centromere repetitive elements: bacc.0143.i9 (205 kb); bacc.0237.j16 (175 kb); and bacc.0270.c1 (180 kb). Sequencing of the bacb.0155.h15 BAC clone confirmed that it contains significant regions of homology to chromosome 4-specific Mo17 BAC clones bacm.pk010.m7, and bacm.pk108.h15. Six of the seven BAC clones (all clones except for bacb.0424.d20) were assembled into a contig based on restriction site analysis. Two clones, bacb.0155.h15 and bacc.0143.i9, had an overlap of approximately 50 kb and covered the entire contig comprising about 240 kb.

[0200] Two groups of BAC clones representing the centromeric region of chromosome 4 from the Mo17 and B73 inbred lines were used for the production of DNA constructs for minichromosome assembly.

### F. Isolation and Purification of Chromosomal Centromeric DNA Fragments

[0201] Essentially all maize genomic DNA is heavily methylated, and this methylation pattern may play a role in the assembly, function, and/or maintenance of maize centromeres. Isolated maize genomic DNA maintaining the methylation and/or other native genomic characteristics, such as size, organization of elements, and other native nucleotide modifications, can be used to generate DNA constructs for maize minichromosome assembly.

i. Restriction Enzyme Selection

[0202] Sequence analysis of maize centromeric repeats identified a large number of restriction enzymes (six cutters) with no recognition sites within any of the centromeric repeats CentA, CentC, CRM1, or CRM2 (Table 6). These restriction enzymes should digest the bulk of genomic DNA into small DNA fragments, the majority of which being about 1-20 kb in size, while centromeric DNA is expected to be significantly longer. Chromosomal centromeric regions from maize can be isolated by partial or complete digestion of maize high-molecular weight (HMW) genomic DNA with at least one of these restriction enzymes. The fraction of digested HMW genomic DNA comprising large fragments of approximately 50 kb-about 1000 kb can be purified after pulsed field gel electorphoresis (PFGE) of maize nuclei embedded in agarose blocks.

ii. HMW Maize Genomic DNA Preparation and Characterization

[0203] HMW maize genomic DNA from Mo17 was prepared essentially as described by Liu and Whittier ((1994) Nucl Acids Res 22:2168-2169) from DNA embedded in agarose blocks by digestion with various restriction enzymes from TABLE 6 and fractionation by PFGE. Five restriction enzymes, BspTI, AatII, Cfr91, MbiI, MluI, were selected for the initial analyses. Of these, BspTI was selected for all further preparations. Blot-hybridization with labeled CentC centromeric probe revealed that the BspTI restriction enzyme produced a set of genomic centromeric DNA fragments ranging from about 50 kb to about 600 kb which were well-separated from the rest of the genomic DNA. Hybridization to the same DNA fragments with three other centromeric probes (CentA, CRM1, and CRM2) confirmed that these long DNA fragments comprising all four centromeric repeats have essentially no BspTI restriction sites. The hybridizing bands may represent individual centromeric DNA fragments that can be isolated and used to generate DNA constructs for minichromosome assembly.

TABLE 6

| | | | |
|---|---|---|---|
| Enzyme | Rec site | Enzyme | Rec site |

| | | | |
|---|---|---|---|
| AatI | AGGCCT | NgoPIII | CCGCGG |
| AatII | GACGTC | Pac25I | CCCGGG |
| AccBSI | CCGCTC | Pae14kI | CCGCGG |
| AflII | CTTAAG | Pae5kI | CCGCGG |
| AhyI | CCCGGG | PaeAI | CCGCGG |
| AspMI | AGGCCT | PaeBI | CCCGGG |
| Bbi24I | ACGCGT | PaeQI | CCGCGG |
| BfrI | CTTAAG | PceI | AGGCCT |
| BpuB5I | CGTACG | Pfl23II | CGTACG |
| BsiWI | CGTACG | Pme55I | AGGCCT |
| BspTI | CTTAAG | PpuAI | CGTACG |
| BsrBI | GAGCGG | PspAI | CCCGGG |
| Bst31NI | CCGCTC | PspALI | CCCGGG |
| Bst98I | CTTAAG | PspLI | CGTACG |
| BstD102I | CCGCTC | SacII | CCGCGG |
| BstPZ740I | CTTAAG | SarI | AGGCCT |
| BvuBI | CGTACG | SchZI | CCGCGG |
| Cfr42I | CCGCGG | SenPT14bI | CCGCGG |
| Cfr9I | CCCGGG | SexBI | CCGCGG |
| CfrJ4I | CCCGGG | SexCI | CCGCGG |
| CscI | CCGCGG | Sfr303I | CCGCGG |
| Eae46I | CCGCGG | SgrBI | CCGCGG |
| EaeAI | CCCGGG | SmaI | CCCGGG |
| EclRI | CCCGGG | SplI | CGTACG |
| Eco147I | AGGCCT | SpuI | CCGCGG |
| Eco29kI | CCGCGG | Sru30DI | AGGCCT |
| Esp4I | CTTAAG | SseBI | AGGCCT |
| GalI | CCGCGG | Ssp5230I | GACGTC |
| GceGLI | CCGCGG | SstII | CCGCGG |
| GceI | CCGCGG | SteI | AGGCCT |
| GdiI | AGGCCT | StuI | AGGCCT |
| Kpn378I | CCGCGG | SunI | CGTACG |
| KspI | CCGCGG | Vha464I | CTTAAG |
| MaeK81I | CGTACG | XcyI | CCCGGG |
| MbiI | CCGCTC | XmaCI | CCCGGG |
| MluI | ACGCGT | XmaI | CCCGGG |
| MspCI | CTTAAG | ZraI | GACGTC |
| NgoAIII | CCGCGG | | |

### Example 2

### Identification and Isolation of Telomeric Sequences

[0204] Any functional telomeric region, native, cloned, or synthetic, comprising a telomeric repeat can be used to make the DNA constructs. Several telomere repeats are known, including those from Tetrahymena, Paramecium, Oxytricha, Euplotes, Dictyostelium, Saccharomyces, Caenorhabditis, Trypanosoma, Leishmania, Physarum, Arabidopsis, human, and mouse.

| | |
|---|---|
| Telomeric Repeat | Exemplary Organism |

| | |
|---|---|
| CCCCAA (C₄A₂) | Tetrahymena, Paramecium |
| CCCCAAAA (C₄A₄) | Oxytricha, Euplotes |
| CCCTA (C₃TA) | Trypanosoma, Leishmania, Physarum |
| C₁₋₃A | Saccharomyces |
| C₁₋₈T | Dictyostelium |
| CCCTAAA (C₃TA₃) | Arabidopsis, human, mouse, |
| | Caenrhabditis |

### A. Synthetic Telomere Sequences

[0205] The highly conserved, repetitive nature of telomeric sequences allows for the chemical synthesis and/or PCR amplification of long telomeric regions suitable for vector construction. Long tracts of telomeric repeats, e.g., (CCCTAAA)n to flank minichromosome ends can be generated.

[0206] Long stretches of tandem telomeric repeats can be produced by several rounds of PCR amplification using primer pair SEQ ID NOS: 5 and 6 by mutual priming of two complementary telomeric oligonucleotides and their products. A PCR reaction using a low concentration of the primers (<0.1 μM) can produce DNA segments of about 100-10000 bp. Optionally, synthetic telomeric repeats can be produced by ligation of phosphorylated oligos. Telomeric DNA segments were cloned and used to produce DNA constructs.

### B. Identification and Isolation of Subtelomeric Sequences

[0207] i. BAC Clones Containing Telomeric Repeats

[0208] BAC clones containing subtelomeric regions comprising telomeric repeats can be used to stabilize chromosomal ends of a minichromosome construct. A number of sequences were previously identified as subtelomeric repeats (Burr et al. (1992) J Plant Cell 4:953-60). The Genbank sequence database was keyword searched for telomeric and subtelomeric sequences. Selected sequences were aligned and a common repetitive element identified (Telo266, SEQ ID NO: 189). Using SEQ ID NO: 189, several oligonucleotides were designed and used as probes to screen the Mo17 BAC library. A number of BACs were recovered, one was selected (bacm.pk107.g1), labeled, and hybridized to pachytene chromosomes. The BAC clone sequences were found in clusters on 6 out of 20 subtelomeres in maize chromosomes. The bacm.pk107.g1 BAC insert was subcloned and sequenced. Sequence analysis revealed a common repetitive element (TR430, SEQ ID NO: 190) which was used to design overgo probes (Table 1). Subtelomeric location of those repeats was confirmed by FISH to maize Mo17 and B73 pachytene chromosomes. Using the same probes, maize Mo17 genomic BAC libraries were screened by colony hybridization.

[0209] Approximately 71 BAC clones containing blocks of maize subtelomeric repeats were confirmed as having the TR430 subtelomere repeat (Table 7).

TABLE 7

| | | | |
|---|---|---|---|
| bacm.pk155.e24 | bacm.pk166.a12 | bacm.pk173.m16 | bacm.pk203.j15 |
| bacm2.pk022.m14 | bacam2.pk092.a9 | bacm2.pk114.i4 | bacm2.pk169.b21 |
| bacm2.pk177.j18 | bacm2.pk190.m10 | bacm2.pk220.h7 | bacm.pk001.k4 |
| bacm.pk009.c19 | bacm.pk024.j15 | bacm.pk024.k8 | bacm.pk036.g23 |
| bacm.pk038.g6 | bacm.pk061.i6 | bacm.pk062.g4 | bacm.pk064.f6 |
| bacm.pk070.j17 | bacm.pk071.c12 | bacm.pk073.m7 | bacm.pk082.m9 |
| bacm.pk101.h5 | bacm.pk107.g1 | bacm.pk110.h10 | bacm.pk112.b18 |
| bacm.pk123.e21 | bacm.pk125.n6 | bacm.pk132.h6 | bacm.pk141.p12 |
| bacm.pk142.b15 | bacm.pk146.l14 | bacm.pk148.j17 | bacm.pk154.a21 |
| bacm.pk155.p12 | bacm.pk157.d2 | bacm.pk164.n4 | bacm.pk165.n1 |
| bacm.pk169.n16 | bacm.pk171.d3 | bacm.pk172.m20 | bacm.pk172.n19 |
| bacm.pk172.n16 | bacm.pk173.e9 | bacm.pk173.i12 | bacm.pk174.g4 |
| bacm.pk176.g2 | bacm.pk184.e5 | bacm.pk185.o19 | bacm.pk189.a10 |
| bacm.pk197.m23 | bacm.pk198.f9 | bacm.pk198.k3 | bacm.pk200.c20 |
| bacm.pk208.j1 | bacm.pk213.f2 | bacm.pk214.i17 | bacm.pk214.k16 |
| bacm.pk214.l11 | bacm.pk214.m20 | bacm2.pk007.d1 | bacm2.pk034.k22 |
| bacm2.pk043.g14 | bacm2.pk043.j16 | bacm2.pk073.o7 | bacm2.pk102.o18 |
| bacm2.pk108.a3 | bacm2.pk117.h13 | bacm2.pk160.l2 | bacm.pk203.j15 |
| bacm.pk155.e24 | bacm.pk166.a12 | baacm.pk173.m16 | bacm2.pk169.b21 |
| bacm2.pk022.m14 | bacam2.pk092.a9 | bacm2.pk114.i4 | bacm.pk001.k4 |
| bacm2.pk177.j18 | bacm2.pk190.m10 | bacm2.pk220.h7 | bacm.pk036.g23 |
| bacm.pk009.c19 | bacm.pk024.j15 | bacm.pk024.k8 | |

[0210] Restriction fingerprinting with DpnI and blot-hybridization with TR430 probes, (CCCTAAA)n probe, and to knob 180 bp repeat probes showed at least 3 types of subtelomeric BAC clones. The first type has long tracts of TR430 related repeats longer than 10-20 kb. The second of BAC clones has TR430 related repeats which have a restriction site within the unit, wherein unit size can be 800 bp or 900 bp. Some BAC clones contained both of these two repeats. The third type of BAC clones has TR430 bp related unit around 500 bp. Some of these BAC clones also have telomeric (CCCTAAA)n related repeats. Knob 180 bp repeats are also present in 37 subtelomeric BAC clones suggesting that knob 180 bp repeats can be a part of some subtelomeric regions. Representative BAC clones of each type were taken for further analyses, retrofitting experiments, and transgenic experiments: bacm.pk038.g6; bacm2.pk063.g24; bacm.pk071.c12; bacm.pk112.b18; bacm.pk142.b15; bacm.pk173.e9. BAC inserts with subtelomeric fragments can be used in DNA constructs for minichromosome assembly in vitro, or assembly in a plant cell.

ii. Isolation of Native Chromosomal Telomeric DNA Fragments

[0211] Chromosomal telomeric fragments that retain at least one native genomic characteristic, such as methylation pattern, were purified from maize genomic DNA by size fractionation of maize genomic DNA digested with restriction enzymes which have a short recognition site of 4 bp or smaller. Native maize telomeric sequence comprises hundreds or thousands of tandem repeats of CCCTAAA at each telomere, this short telomere tandem repeat has no recognition site for any known restriction enzyme. Any short cutter restriction enzymes which recognize 2-4 bp sequence can be used, as long as they have no specificity to canonical telomeric tandem repeat (CCCTAAA)n. Short cutters digest most of genomic DNA onto small fragments which can be separated from larger telomeric DNA. Using a combination of two or more short cutting restriction enzymes can eliminate other non-telomeric DNA fragments not fragmented by the first enzyme. There are no known restriction enzymes having a recognition site within canonical tandem telomeric repeat.

[0212] Maize genomic DNA from Mo17 was digested with Sau3A restriction enzyme, most maize genomic DNA is reduced to very small fragments well below 1 kb, while the majority of telomeric DNA fragments are larger than about 15 kb as determined by blot hybridization. The overall length of Sau3A telomere DNA segments per haploid genome is about 400 kb, or 0.02% of the total maize haploid genome. Approximately 1 mg of total maize genomic DNA yields approximately 200 ng of telomeric DNA fragments in the undigested relic fraction. The genomic telomeric DNA fraction can be purified from the gel and used to generate DNA constructs for minichromosome assembly.

### Example 3

### Origin of Replication

[0213] The DNA constructs are retrofitted with DNA segments carrying replication origins to enable proper replication of the construct and/or minichromosome in the nuclei of transgenic plant cells. Any origin of replication which functions in a plant cell can be used. Available origins of replication are known and include plant origins of replication, and viral origins of replication. Optionally, if a construct will be maintained in a non-plant host cell at least one appropriate origin of replication can be included in the construct, for example bacterial and/or yeast origin(s) of replication.

A. Non-Transcribed Spacer of 18-26S rDNA

[0214] A well-established eukaryotic replication origin is the non-transcribed spacer of 18-26S rDNA (Ivessa and Zakian (2002) Genes Dev 16:2459-2464) which is likely functional in plants (Hernandez et al. (1993) EMBO J. 12:1475-85). The 18-26S rDNA NTS DNA sequences can be isolated from a variety of different plant species, such as Zea mays, Triticum aestivum, Avena sativa, Hordeum vulgare, Arabidopsis thaliana, and/or Glycine max. These sequences are cloned into constructs as single or multiple dispersed copies. Eukaryotic chromosomes typically have multiple origins of replication, therefore inclusion of multiple origins of replication in the DNA constructs may be useful. Unless otherwise stated, the 18-26S rDNA NTS sequence from maize is used in the DNA constructs (Toloczyki and Feix (1986) Nucl Acids Res 14:4969-86).

### B. Wheat Dwarf Virus (WDV) Initiator Protein (Rep)

[0215] Wheat dwarf virus (WDV) initiator protein (Rep) and its cognate origin of replication can be used for generating DNA constructs for minichromosome assembly. The wheat dwarf virus (WDV) initiator protein (Rep) and its cognate origin of replication can be used to support replication of minichromosome constructs in maize cells. The WDV origin of replication can be provided on the DNA construct (in cis), while genes needed for initiator Rep protein and cell cycle stimulating RepA protein can be provided by co-transformation on independent plasmid constructs (in trans) (Sanz-Burgos and Gutierrez (1998) Virology 243:119-129.).

### Example 4

### Polynucleotides and Polypeptides that Stimulate Growth

[0216] Polynucleotides and/or polypeptides that enhance cell growth by promoting cell division, entrance into S phase, stimulate cell division and/or growth in culture, or improve transformation can be provided before, during, or after introducing DNA constructs comprising maize centromeric sequence and/or subtelomeric fragment. Any such composition, or combination thereof can be used including polynucleotides, polypeptides, and/or other factors using any suitable delivery method.

### A. Replication Associated Protein A.

[0217] Replication protein A from wheat dwarf virus (WDV) can be provided to enhance cell growth and/or recovery of transgenic events. Both RepA that retains replication activity and a modified RepA that does not support viral replication can be used. For example, a plasmid carrying nos promoter::RepA can be co-delivered into plant cells with the DNA construct(s). Transient expression of RepA during first three days is expected to be sufficient to stimulate cell division and enhance event recovery (see, for example, WO00/50614, herein incorporated by reference)

### B. Cyclins

[0218] Cyclin proteins, involved in cell cycle modulation may enhance cell growth and recovery of transgenic events. For example, maize cyclin D can stimulate cell division and callus growth in culture and improve maize transformation. Ectopic expression of E2F induced cell proliferation in Arabidopsis, this effect was enhanced by co-expression of DPa (de Veylder et al. (2002) EMBO J. 21:1360-1368). Many cell cycle homologues, including cyclin D, cyclin E, wee1, Rb, Rbr3, E2F/DP, and the like have been isolated from plants (U.S. Pat. No. 6,518,487; WO99/61619; WO0/37645; WO02/074909; Xie et al. (1996) EMBO J. 15:4900-4908; all of which are herein incorporated by reference), and can be introduced into vectors for delivery into plant cells.

### C. Wuschel

[0219] Genes that trigger specific developmental pathways are also useful in enhancing cell growth. For example, members of the WOX family, such as wuschel (WUS) appear to stimulate cell division in both cells expressing WUS and adjacent cells. A construct comprising a polynucleotide encoding a WUS polypeptide can be used to stimulate cell division by co-transformation with the DNA construct(s). Several WUS homologues are known in plants, such as Arabidopsis and maize (e.g., Mayer et al. (1998) Cell 95:805-815; WO01/0023575; and US2004/0166563, all of which are herein incorporated by reference), and can be used to enhance the growth of transformed cells. For example, a construct comprising a maize WUS gene was constructed:

[0220] PHP21139 ubi pro::ubi 5′ UTR::ubi intron::WUS::pinII

### D. Ovule Development Protein 2

[0221] Other genes of interest include those related to the AP2/ERF family of transcription factors which are preferentially expressed in developing embryos and seeds, including Ovule development Protein 2 (ZmODP2) which is expressed early in maize embryogenesis. When ectopically expressed, ODP2 may stimulate cell growth in a variety of tissues, including non-embryonic tissues, which can facilitate the recovery of transgenic events. This gene family includes baby boom (BBM, BNM3, ODP2) which has been shown to induce ectopic somatic embryos in plants (Boutilier et al. (2002) Plant Cell 14:1737-1749). BBM/ODP2 homologues are known, including homologues from maize (WO00/75530, herein incorporated by reference) and can be delivered to plant cells to enhance cell growth. For example, a construct comprising a maize ODP2 gene was constructed:

[0222] PHP21875 ubi pro::ubi 5′ UTR::ubi intron::ODP2::pinII

### E. Knotted-1

[0223] Homeobox genes, including members of the knox gene family, such as KN1, KNAT1, and STM function in meristem initiation and/or maintenance in plants (Jackson et al. (1994) Dev 120:405-413; Lincoln et al. (1994) Plant Cell 6:1859-1876; Venglat et al. (2002) Proc Natl Acad Sci USA 99:4730-4735). Many knox family members are known in plants, including homologues from maize (Vollbrecht and Hake (1991) Nature 350:241-243; Kerstetter et al. (1994) Plant Cell 6:1877-1887; Serikawa et al. (1996) Plant Mol Biol 32:673-683) and can be used to construct vectors for delivery into plant cells.

### F. Lec1

[0224] Leafy cotyledon genes, such as Lec1 and Lec2, are involved in the regulation of embryogenesis and transcriptional activity in plants (Meinke et al. (1994) Plant Cell 6:1049-1064; Lotan et al. (1998) Cell 93:1195-1205; WO00/28058; Stone et al. (2001) Proc Natl Acad Sci USA 98:11806-11811; U.S. Pat. No. 6,492,577, herein incorporated by reference). Many homologues are known which can be used to construct vectors for delivery into plant cells.

### G. Combination of Growth Stimulating Polynucleotides

[0225] A combination of polynucleotides and/or polypeptides that enhance cell growth by promoting cell division, entrance into S phase, stimulate cell division and/or growth in culture, or improve transformation can be provided before, during, or after introducing DNA constructs comprising maize centromeric sequence and/or subtelomeric fragment. For example polynucleotides encoding a maize ODP2 (PHP21875) and a maize WUS (PH121139) can be used in transformation experiments with DNA construct(s) comprising maize centromeric and/or subtelomeric regions. In general ODP2 and/or WUS in particle bombardment co-transformation of immature maize embryos, as described in Example 6D, showed a significant increase in the frequency of transgenic events as determined by BARR phenotype and fluorescent marker protein (DsRed) expression. On average 1008 events/4800 primary embryos (21%) were observed when were provided in the transformation mixture. Without PHP21139 or PHP21875, 8 events/706 primary embryos (˜1%) were observed. Further analyses of transgenic events indicated that the ODP2 and/or WUS co-bombarded constructs were not integrated into the genome or assembled minichromosomes.

### Example 5

### Vector Construction

[0226] Vectors, circular or linear, for delivery into plant cells using any standard transformation protocol are constructed using standard molecular biology protocols, see, e.g., Sambrook et al. (1989) Molecular Cloning: A Laboratory Manual, 2nd Ed., Cold Spring Harbor Laboratory Vols. 1-3. Vectors for the transformation of plant cells are constructed by combining isolated chromosomal elements, optionally with other polynucleotides of interest, using standard techniques. The vectors include those designed to be maintained in a convenient host system such as E. coli, Agrobacterium, or yeast, as well as in plant cells. Typically, the construct further comprises a selectable and/or screenable marker that functions in plant cells to aid in the maintenance, identification, and/or selection of plant cells comprising the minichromosome construct. Further, the construct typically comprises several unique restriction sites where additional polynucleotides of interest can be cloned. The construct may also comprise site-specific recombination sites useful for recombinational cloning, and/or for later targeting and/or modification of the minichromosome. DNA constructs derived from maize BAC clones comprising centromeric sequences for direct delivery or Agrobacterium-mediated plant transformation are described below. Various components can be supplied either on the BAC clone construct, and/or in trans on separate DNA constructs.

### A. Markers

[0227] A variety of markers can be used to identify transformed cells comprising the introduced DNA construct(s). Visual markers include fluorescent proteins, such as AmCyan, ZsYellow, or DsRed (ClonTech Laboratories, Inc., Mountain View, Calif., USA). Selectable markers include PAT, BAR, GAT, and the like.

[0228] An expression cassette, PHP 23715, for delivery to plant cells comprising a red fluorescent protein (DsRed2) and a PAT selectable marker was constructed comprising the following operably linked components:

[0229] ubi pro::ubi 5′UTR::ubi intron::DsRed2::moPAT::pinII

[0230] A DNA construct, PHP 23714, comprising a cyan fluorescent protein (AmCyan) for delivery to plant cells is constructed comprising the following operably linked components:

[0231] ubi pro::ubi 5′UTR::ubi intron::AmCyan1::moPAT::pinII

B. Agrobacterium vectors

[0232] Agrobacterium binary plasmids are made using the hybrid system described by Komari et al. ((1996) Plant J 10:165-174). Derivatives of pSB11 are built as intermediate T-DNA constructs containing the desired configuration between the T-DNA border sequences. Plasmid pSB11 is obtained from Japan Tobacco Inc. (Tokyo, Japan). Construction of pSB11 from pSB21, and construction of pSB21 from starting vectors, is described by Komari et al. ((1996) Plant J 10:165-174). Description of integration of the T-DNA plasmid into the superbinary plasmid pSB1 by homologous recombination can be found in EP672752 A1. The plasmid pSB1 is also obtained from Japan Tobacco Inc. These plasmids are used for Agrobacterium-mediated transformation after making the co-integrant in LBA4404. Electro-competent cells of the Agrobacterium strain LBA4404 harboring pSB1 are created using the protocol as described by Lin (1995) in Methods in Molecular Biology, ed. Nickoloff, J. A. (Humana Press, Totowa, N.J.). Cells and DNA are prepared for electroporation by mixing 1 μl plasmid DNA (˜100 ng) with 20 μl of competent cells in a Life Technologies (now Whatman Biometra) 0.15 cm electrode gap cuvette (Whatman Biometra #11608-031). Electroporation is performed in a Cell-Porator Electroporation device using the Pulse Control unit (Whatman Biometra #11604-014) at the 330 μF setting along with the Voltage Booster (Whatman Biometra #11612-017) set at 4 kW. The system delivers approximately 1.8 kV to the Agrobacterium cells. Successful recombination is verified by restriction analysis of the co-integrant plasmid following isolation and transformation back into E. coli DH5α cells for amplification.

C. In vitro Assembly of Linear DNA Constructs via Ligation

[0233] Linear DNA construct minichromosome vectors are produced by preparing the component DNA fragments such as maize centromeric sequences, selectable markers (DsRed2 and AmCyan), eukaryotic origin(s) of replication (ori), telomeric sequences (TEL), and gene conferring resistance to bialophos (PAT) under ubiquitin promoter (ubi). In one example, linear minichromosome vectors were made from centromeric BAC clone bacm.pk128.j21 which comprises inverted repeats of CentC tandem arrays flanking a CRM1 centromeric repeat element. DNA fragments were generated from bacm.pk128.j21 by digestion with NotI and agarose gel purification. The purified fragment comprising the centromeric region was combined with specific restriction digest fragments comprising selectable marker(s) and replication origin: ubi pro::ubi 5′ UTR::ubi intron::DsRed::moPAT-18S-26S rDNA NTS (NotI/SpeI), and a second selectable marker cassette: ubi pro::ubi 5′ UTR::ubi intron::AmCyan::moPAT (NotI/SmaI), and telomeric sequences (SpeI/XhoI or SmaI/KpnI) from their constructs. DNA fragments were prepared such that each fragment comprised unique recognition sites for in vitro assembly of a unique linear structure during ligation. The assembled linearized vector comprises: TEL-(SpeI)-ubi pro::ubi 5′ UTR:ubi intron::AmCyan::moPAT-(NotI)-bacm.pk128.j21-(NotI)-ori-ubi pro::ubi 5′ UTR::ubi intron::DsRed::moPAT-(SmaI)-TEL

### D. DNA Constructs—Circular Retrofitted BAC Clone Vectors

[0234] Any centromeric and/or subtelomeric BAC clone or chromosomal fragment clone can be retrofitted with additional components for plant transformation.

[0235] The EPICENTRE EZ::TN™ pMOD™-2 MCS Transposon Construction Vector system (EpiCentre Madison, Wis., USA) is used to retrofit polynucleotides of interest into existing BAC clones. The pMOD-2 is a pUC based plasmid with a colE1 origin of replication and multiple cloning site (MCS) between the hyperactive 19 bp mosaic ends (ME) recognized by EZ-Tn5 transposase. The Tn5-2 transposon integrates randomly into each target DNA, therefore each transposistion reaction generates a small library of constructs representing different integration sites. DNA preparations of individual retrofitted clones or a group of clones can be used for transformation of plant cells.

i. Centromeric BACs

[0236] Two representatives of CentC-only BACs, bacm.pk018.l13 and bacm2.pk174.o21, were selected based on their restriction enzyme digest and Southern hybridization patterns. These BAC clones were retrofitted using the EPICENTRE EZ::TN™ pMOD™-2 MCS construction system to generate circular DNA constructs for plant transformation and minichromosome assembly.

[0237] The MCS was used to insert a DNA fragment comprising selectable markers: ubi pro::ubi 5′ UTR::ubi intron::DsRed::moPAT with or without a maize 18-26S rDNA NTS ori to produce a first version of a custom transposon construct, Tn5-1s. After cloning the DNA sequences of interest, the transposon is generated by PshAI restriction enzyme digest. Upon integration BAC constructs are transformed into E. coli, positive clones selected by colony hybridization with the transposon probes, and DNA isolated from selected positive clones.

ii. Subtelomeric BACs

[0238] Six representative BAC clones were selected from the subtelomeric BAC pool: bacm.pk038.g06, bacm2.pk063.g24, bacm.pk071.c12, bacm.pk112.b18, bacm.pk142.b15, and bacm.pk173.e09. New custom Tn5-2 transposon constructs comprising 18-26S rDNA NTS ori-ubi pro::ubi 5′ UTR::ubi intron::DsRed::moPAT, a Kan^{r} gene, and sites for three different homing restriction enzymes: I-PpoI, I-CeuI, and PI-SceI, were built and used to retrofit the subtelomeric BAC clones. The retrofitted BAC constructs are transformed into E. coli and selected on kanamycin and chloramphenicol, DNA is isolated from selected positive clones.

### E. DNA Constructs—Linearized Retrofitted BAC Clones

[0239] Additional custom Tn5-3 transposon constructs were generated. These Tn5-3 vectors comprise 18-26S rDNA NTS ori-ubi pro::ubi 5′ UTR::ubi intron::DsRed::moPAT. The constructs also comprise a Kan^{r} gene flanked by two DNA segments in inverted orientation each composed of two recognition sites for the homing restriction enzymes I-CeuI and PI-SceI, and telomeric sequence comprising arrays of telomeric repeats. After cloning the DNA sequences of interest, the transposon is generated by PshAI restriction enzyme digest. Upon integration BAC constructs are transformed into E. coli and selected on kanamycin and chloramphenicol, DNA is isolated from selected positive clones. Recombinant retrofitted BAC DNA is digested in vitro with homing restriction enzyme (I-CeuI or PI-SceI) converting the circular DNA into a linear DNA construct flanked with telomeric sequences in the correct orientation, and removing the fragment comprising Kan^{r} (FIG. 13).

[0240] Three types of centromeric BAC clones were retrofitted with this Tn5-3 vector:

1. Centromeric BAC clone with inverted blocks of centromeric CentC repeats flanking a CRM1 centromeric element bacm.pk128.j21, no CentA or CRM2 sequences;
2. Centromeric BAC clones belonging to the core set of centromeric BAC clones containing all four centromere-specific repeats CentA, CentC, CRM1, and CRM2 (Table 8); and,
3. Centromeric BAC clones from maize chromosome 4 (Table 9).

[0241] DNA samples from each BAC clone are fractionated in an agarose gel and the band containing linear retrofitted BAC construct excised. DNA is electroeluted from the agarose and used for biolistic transformation of Hi-II immature embryos 8-11 DAP (days after pollination). Optionally, these constructs can be used for microinjection of the DNA, or converted into vectors for Agrobacterium-mediated transformation.

TABLE 8

| Pool 1 | Pool 2 | Pool 3 | Pool 4 |
|---|---|---|---|
| bacm.pk007.a2 | bacm.pk011.l8 | bacm.pk001.n1 | bacm.pk109.h24 |
| bacm.pk036.e13 | bacm.pk012.n20 | bacm.pk023.i5 | bacm.pk039.a3 |
| bacm.pk066.j14 | bacm.pk013.m8 | bacm.pk043.o23 | bacm.pk039.m16 |
| bacm.pk075.l6 | bacm.pk062.c14 | bacm.pk051.g11 | bacm.pk041.e16 |
| bacm.pk076.m3 | bacm.pk064.n1 | bacm.pk056.j19 | bacm.pk077.b21 |
| bacm.pk119.a23 | bacm.pk068.p16 | bacm.pk076.o15 | bacm.pk079.m11 |
| bacm.pk133.b10a | bacm.pk070.h17 | bacm.pk087.m4 | bacm.pk085.k5 |
| bacm.pk133.b10b | bacm.pk090.o5 | bacm.pk089.l8 | bacm.pk098.h2 |
| bacm.pk133.b11 | bacm.pk098.f3 | bacm.pk093.d8 | bacm.pk102.i4 |
| bacm.pk135.i6 | bacm.pk135.l7 | bacm.pk106.j20 | bacm.pk112.p1 |
| bacm.pk178.c10 | bacm2.pk002.g7 | bacm.pk129.a4 | bacm.pk124.j24 |
| bacm2.pk023.e24 | bacm2.pk003.g6 | bacm.pk134.f15 | bacm.pk143.m18 |
| bacm2.pk064.e15 | bacm2.pk012.g19 | bacm.pk135.j2 | bacm.pk148.e2 |
| bacm2.pk066.m12 | bacm2.pk013.c9 | bacm.pk138.e14 | bacm.pk156.i17 |
| bacm2.pk083.a2 | bacm2.pk034.g20 | bacm.pk141.j4 | bacm.pk164.b11 |
| bacm2.pk093.h11 | bacm2.pk053.g23 | bacm.pk161.h1 | bacm.pk166.n7 |
| bacm2.pk099.m24 | bacm2.pk070.g7 | bacm.pk164.e18 | bacm.pk178.o20 |
| bacm2.pk116.g16 | bacm2.pk094.f14 | bacm.pk179.d4 | bacm2.pk034.j8 |
| bacm2.pk174.e4 | bacm2.pk096.d23 | bacm2.pk130.e20 | bacm2.pk075.n6 |
| bacm2.pk179.b18 | bacm2.pk100.j24 | bacm2.pk137.f2 | bacm2.pk115.o22 |
| bacm2.pk179.e1 | bacm2.pk179.o14 | bacm2.pk158.f12 | bacm2.pk169.a21 |

TABLE 9

| Chromosome | Chromosome |
|---|---|
| 4-specific | 4-specific |
| B73-pool | Mo17-pool |
| baccpk0143i9 | bacm.pk010m7 |
| bacbpk0155h15 | bacm.pk108h15 |
| bacbpk0424d20 | bacm.pk184c21 |

### F. DNA Constructs—Retrofitted Multiple BAC Combination Vectors

[0242] Centromeric BAC clones belonging to the core set of centromeric BAC clones containing all four centromere-specific repeats CentA, CentC, CRM1, and CRM2 (Table 8) were also retrofitted with the Tn5-2 vector. Tn5-2 constructs comprising ori-ubi pro::ubi 5′ UTR::ubi intron::DsRed2::moPAT, a Kan^{r} gene, and sites for three homing restriction enzymes: 1-PpoI, I-CeuI, and PI-SceI. The retrofitted BACs were cut with homing restriction enzymes I-CeuI and PI-SceI, separated by pulsed field gel electrophoresis (PFGE) under standard conditions: 1% agarose, 1×TAE, initial pulse 5 sec, final pulse 10 sec, total run time 12 hrs at 12° C. Large fragments were purified, and subjected to ligation to form multimeric DNA constructs up to 1 Mb long.

### Example 6

### Plant Transformation

[0243] Any suitable plant transformation method can be used. Similarly any plant cell and/or tissue that can be transformed, cultured, and/or regenerated into a plant can be used. These plant cells and tissues, as well as culture media and conditions, suitable transformation methods, and regeneration media and conditions are well known.

### A. Cell Types

[0244] A variety of maize cell types were evaluated for their potential as targets for minichromosome generation and construct delivery, including Black Mexican Sweet (BMS) suspension cells, meristem cells, the zygote, scutellar cells in the immature embryo, cells in cultured somatic embryos, the central cell and early endosperm cells. Methods are available to produce haploid embryos by crossing a given genotype to the RWS line, or other inducer line. Haploid immature embryos could be a good target for minichromosome delivery, either into scutellar cells 10-12 days after pollination (DAP) or into the exposed apical meristems of coleoptilar stage embryos (7-8 DAP). Important comparisons on the behavior of introduced minichromosomes into either a diploid or haploid environment could be performed, moreover, if minichromosome introduction is followed by chemically-induced chromosome doubling (e.g., colchicine, or nitrous oxide), these doubled-haploid embryos can be rapidly regenerated to produce a minichromosome-containing inbred. All of the aforementioned diploid and haploid cell types can be converted into suspension cultures and/or protoplasts, or established suspension cultures, such as BMS are suitable and can be used for transformation. Suspension cells and/or protoplasts may provide easy accessibility and optical clarity for microscopic monitoring after DNA construct delivery. Any suitable method for delivery of the construct to the plant protoplast culture can be used, including standard electroporation and PEG-mediated direct delivery methods, see, e.g., Ch. 8, pp. 189-253 in Advances in Cellular and Molecular Biology of Plants, Vol. 5, Ed. Vasil, KluwerAcad Publ (Dordrecht, The Netherlands) 1999.

### B. Microinjection of Maize

[0245] Any suitable method for microinjection of plant cells, tissues, and/or embryos can be used. Further, any composition or combination/mixture of compositions can be injected, including polynucleotides, polypeptides, cofactors, chemicals, adjuvants, and the like. Direct delivery into a zygote provides an opportunity to produce a transgenic plant without the intermediate steps of tissue culture and regeneration. For example, microinjection of maize can be done essentially as described in U.S. Pat. No. 6,300,543. Briefly, immature maize ovules are sectioned to produce nuclear slabs comprising the embryo sac, which is targeted for microinjection delivery of the transformation composition. Following microinjection, the embryo sacs are cultured in the appropriate media for propagation and plant regeneration.

### C. Agrobacterium Mediated Transformation

[0246] Agrobacterium mediated transformation of maize is performed essentially as described by Zhao (WO98/32326). Briefly, immature embryos are isolated from maize ovules and the embryos contacted with a suspension of Agrobacterium containing a T-DNA, where the bacteria are capable of transferring the DNA construct to at least one cell of at least one of the immature embryos. Optionally, the target tissue can be co-transformed with multiple Agrobacterium lines comprising T-DNAs with different DNA constructs and/or polynucleotides of interest.

Step 1: Infection Step. Immature embryos are immersed in an Agrobacterium suspension for the initiation of inoculation.
Step 2: Co-cultivation Step. The embryos are co-cultured for a time with the Agrobacterium.
Step 3: Resting Step. Optionally, following co-cultivation, a resting step may be performed. The immature embryos are cultured on solid medium with antibiotic, but without a selecting agent, for elimination of Agrobacterium and for a resting phase for the infected cells.
Step 4: Selection Step. Inoculated embryos are cultured on medium containing a selective agent and growing transformed callus is recovered. The immature embryos are cultured on solid medium with a selective agent resulting in the selective growth of transformed cells.
Step 5: Regeneration Step. Calli grown on selective medium are cultured on solid medium to regenerate the plants.

[0247] D. Particle Bombardment of Maize

[0248] Immature maize embryos are bombarded with a circular or linear DNA construct comprising an isolated maize centromeric sequence, and optionally subtelomeric region(s), origin(s) of replication, recombination docking site(s), polypeptide(s), and/or markers, for example a selectable marker gene such as PAT (Wohlleben et al. (1988) Gene 70:25-37) that confers resistance to the herbicide Bialaphos, or another suitable selectable marker or screenable marker(s), such as RFP and/or CFP. The construct may also comprise other marker genes, or be co-transformed with additional polynucleotide constructs comprising markers. Transformation is performed essentially as follows.

[0249] Immature maize ears from 8-11 DAP are surface sterilized in a solution of 30% bleach plus 0.5% Micro detergent for 20 minutes, and rinsed two times with sterile water. The immature embryos are excised, placed embryo axis side down (scutellum side up), 50 embryos per plate, on 560L medium for 1-3 days at 26° C. in the dark. Before transformation the immature embryos are transferred on to 560Y medium for 4 hours, and then aligned within the 2.5-cm target zone in preparation for bombardment.

[0250] The DNA is precipitated onto 0.6 μm (average diameter) gold pellets using a water-soluble cationic lipid Tfx™-50 (Cat# E1811, Promega, Madison, Wis., USA) as follows: prepare DNA solution on ice using 1 μg of maize centromeric DNA construct (10 μl); optionally other constructs for co-bombardment such as 50 ng (0.5 μl) PHP21875 (BBM), and 50 ng (0.5 μl) PHP21139 (WUS); mix DNA solution. To the pre-mixed DNA add 20 μl prepared gold particles (15 mg/ml) in water; 10 μl Tfx-50 in water; mix carefully. This can be stored on ice during preparation of macrocarriers, typically about 10 min. Pellet gold particles in a microfuge at 10,000 rpm for 1 min, remove supernatant. Carefully rinse the pellet with 100 ml of 100% EtOH without resuspending the pellet, carefully remove the EtOH rinse. Add 20 μl of 100% EtOH and carefully resuspend the particles by brief sonication, 10 μl spotted onto the center of each macrocarrier and allowed to dry about 2 minutes before bombardment.

[0251] The sample plates of maize target embryos are bombarded twice per plate using approximately 0.5 μg of DNA per shot using the Bio-Rad PDS-1000/He device (Bio-Rad Laboratories, Hercules, Calif.) with a rupture pressure of 450 PSI, a vacuum pressure of 27-28 inches of Hg, and a particle flight distance of 8.5 cm.

[0252] Following bombardment, the embryos are transferred to 560P solid medium kept in the dark at 26° C. for 4-6 days, then transferred to 560R selection medium containing 3 mg/L Bialaphos, and subcultured every 2 weeks. After approximately 10 weeks of selection, selection-resistant callus clones are transferred to 288J medium to initiate plant regeneration. Following somatic embryo maturation (2-4 weeks), well-developed somatic embryos are transferred to 272V medium for germination and transferred to the lighted culture room. Approximately 7-10 days later, developing plantlets are transferred to 272V hormone-free medium in tubes for 7-10 days until plantlets are well established. Plants are then transferred to inserts in flats (equivalent to 2.5″ pot) containing potting soil and grown for 1 week in a growth chamber, subsequently grown an additional 1-2 weeks in the greenhouse, then transferred to classic 600 pots (1.6 gallon) and grown to maturity.

### E. Particle Bombardment of Soybean

[0253] A polynucleotide, a mixture of polynucleotides, and optionally, polypeptide(s), can be introduced into embryogenic suspension cultures of soybean by particle bombardment using essentially the methods described in Parrott et al. (1989) Plant Cell Rep 7:615-617. This method, with modifications, is described below.

[0254] Seed is removed from immature pods and cotyledons less than 4 mm in length are selected. The seeds are sterilized for 15 minutes in a 0.5% v/v bleach solution and then rinsed with sterile distilled water. The immature cotyledons are excised by first cutting away the portion of the seed that contains the embryo axis. The cotyledons are then removed from the seed coat by gently pushing the distal end of the seed with the blunt end of the scalpel blade. The cotyledons are then placed in petri dishes (flat side up) with SB1 initiation medium. The petri plates are incubated in the light (16 hr day; 75-80 μE) at 26° C. After 4 weeks of incubation the cotyledons are transferred to fresh SB1 medium. After an additional two weeks, globular stage somatic embryos that exhibit proliferative areas are excised and transferred to FN Lite liquid medium (Samoylov et al. (1998) In Vitro Cell Dev Biol Plant 34:8-13). About 10 to 12 small clusters of somatic embryos are placed in 250 ml flasks containing 35 ml of SB172 medium. The soybean embryogenic suspension cultures are maintained in 35 mL liquid media on a rotary shaker, 150 rpm, at 26° C. with fluorescent lights (20 μE) on a 16:8 hour day/night schedule. Cultures are sub-cultured every two weeks by inoculating approximately 35 mg of tissue into 35 mL of liquid medium.

[0255] Soybean embryogenic suspension cultures are then transformed using particle gun bombardment (Klein et al. (1987) Nature 327:70; U.S. Pat. No. 4,945,050). A BioRad Biolistica PDS1000/HE instrument can be used for these transformations. A selectable marker gene can used to facilitate soybean transformation for example an expression cassette can be used comprising the 35S promoter from Cauliflower Mosaic Virus (Odell et al. (1985) Nature 313:810-812), the hygromycin phosphotransferase gene from plasmid pJR225 (from E. coli; Gritz et al. (1983) Gene 25:179-188) and the 3′ region of the nopaline synthase gene from the T-DNA of the Ti plasmid of Agrobacterium tumefaciens.

[0256] To 50 μL of a 60 mg/mL 1 μm gold particle suspension is added (in order): 5 μL DNA (1 μg/μL), 20 μl spermidine (0.1 M), and 50 μL CaCl₂ (2.5 M). The particle preparation is agitated for three minutes, spun in a microfuge for 10 seconds and the supernatant removed. The DNA-coated particles are washed once in 400 μL 70% ethanol then resuspended in 40 μL of anhydrous ethanol. The DNA/particle suspension is sonicated three times for one second each. Five μL of the DNA-coated gold particles are then loaded on each macro carrier disk.

[0257] Approximately 300-400 mg of a two-week-old suspension culture is placed in an empty 60×15 mm petri dish and the residual liquid removed from the tissue with a pipette. Membrane rupture pressure is set at 1100 psi and the chamber is evacuated to a vacuum of 28 inches mercury. The tissue is placed approximately 8 cm away from the retaining screen, and is bombarded three times. Following bombardment, the tissue is divided in half and placed into two separate flasks with 35 ml of FN Lite medium per flask.

[0258] Five to seven days after bombardment, the liquid medium is exchanged with fresh medium. Eleven days post bombardment the medium is exchanged with fresh medium containing 50 mg/mL hygromycin. This selective medium is refreshed weekly. Seven to eight weeks post-bombardment, green transformed tissue will be observed growing from untransformed, necrotic embryogenic clusters. Isolated green tissue is removed and inoculated into individual flasks to generate new, clonally propagated, transformed embryogenic suspension cultures. Each new line is treated as an independent transformation event. These suspensions are then subcultured and maintained as clusters of immature embryos, or tissue is regenerated into whole plants by maturation and germination of individual embryos.

[0259] For regeneration, events are removed from liquid culture and a maturation process is started on solid medium. Embryogenic clusters are removed from liquid SB196, blotted on sterile filter paper, and placed on solid agar media SB166 for 1-2 weeks. Tissue clumps are broken or gently squashed with spoonula. About 10-20 tissue clumps of about 4-5 mm diameter are subcultured for 3 weeks on medium SB103 or SB148, to generate embryos. Embryos are cultured for 4-6 weeks at 26° C. under cool white fluorescent and Agro bulbs (40 watt) on a 16:8 hr photoperiod with light intensity of 90-120 μE/m2s. After 4-6 weeks of maturation, individual embryos are desiccated by placing into a large (60×25 mm) sterile petri dish sealed with fiber tape, or placed in plastic box (with no fiber tape) for 4-7 days. Desiccated embryos are planted in solid SB71-4 medium in either vented round culture vessel (RCV) or into 100×25 mm petri dish, and germinated at 26° C. under cool white fluorescent and Agro bulbs (40 watt) on a 16:8 hr photoperiod with light intensity of 90-120 μE/m2s to produce plantlets. Plantlets are potted to cell pack trays and placed in an incubator at conditions of 16 hr photoperiod, 26° C./24° C. day/night temperatures for about 2 weeks before transplanting to soil for seed production.

### F. Plant Cell Culture Media

[0260] Medium 560L comprises 4.0 g/L N6 basal salts (Sigma C-1416), 1.0 ml/L Eriksson's Vitamin Mix (1000× Sigma 1511), 0.5 mg/L thiamine HCl, 20 g/L sucrose, 1.0 mg/L 2,4-D, and 2.88 g/L L-proline (brought to volume with D-I H₂O following adjustment to pH 5.8 with KOH); 2.0 g/L Gelrite® (added after bringing to volume with D-I H₂O); and 8.5 mg/L silver nitrate (added after sterilizing the medium and cooling to room temperature).

[0261] Medium 560P comprises 4.0 g/L N6 basal salts (Sigma C-1416), 1.0 ml/L Eriksson's Vitamin Mix (1000× Sigma 1511), 0.5 mg/L thiamine HCl, 30 g/L sucrose, 2.0 mg/L 2,4-D, and 0.69 g/L L-proline (brought to volume with D-I H₂O following adjustment to pH 5.8 with KOH); 3.0 g/L Gelrite® (added after bringing to volume with D-I H₂O); and 0.85 mg/L silver nitrate (added after sterilizing the medium and cooling to room temperature).

[0262] Medium 560Y comprises 4.0 g/L N6 basal salts (Sigma C-1416), 1.0 ml/L Eriksson's Vitamin Mix (1000× Sigma 1511), 0.5 mg/L thiamine HCl, 120 g/L sucrose, 1.0 mg/L 2,4-D, and 2.88 g/L L-proline (brought to volume with D-I H₂O following adjustment to pH 5.8 with KOH); 2.0 g/L Gelrite® (added after bringing to volume with D-I H₂O); and 8.5 mg/L silver nitrate (added after sterilizing the medium and cooling to room temperature).

[0263] Medium 560R comprises 4.0 g/L N6 basal salts (Sigma C-1416), 1.0 ml/L Eriksson's Vitamin Mix (1000× Sigma 1511), 0.5 mg/L thiamine HCl, 30.0 g/L sucrose, and 2.0 mg/L 2,4-D (brought to volume with D-I H₂O following adjustment to pH 5.8 with KOH); 3.0 g/L Gelrite (added after bringing to volume with D-I H₂O); and 0.85 mg/L silver nitrate and 3.0 mg/L bialaphos (both added after sterilizing the medium and cooling to room temperature).

[0264] Medium 288J comprises: 4.3 g/L MS salts (Gibco 11117-074), 5.0 ml/L MS vitamins stock solution (0.100 g/L nicotinic acid, 0.02 g/L thiamine HCl, 0.10 g/L pyridoxine HCl, and 0.40 g/L glycine brought to volume with D-I H₂O) (Murashige and Skoog (1962) Physiol Plant 15:473), 100 mg/L myo-inositol, 0.5 mg/L zeatin, 60 g/L sucrose, and 1.0 ml/L of 0.1 mM abscissic acid (brought to volume with D-I H₂O after adjusting to pH 5.6); 3.0 g/L Gelrite (added after bringing to volume with D-I H₂O); and 1.0 mg/L indoleacetic acid and 3.0 mg/L bialaphos (added after sterilizing the medium and cooling to 60° C.).

[0265] Medium 272V comprises: 4.3 g/L MS salts (Gibco 11117-074), 5.0 ml/L MS vitamins stock solution (0.100 g/L nicotinic acid, 0.02 g/L thiamine HCl, 0.10 g/L pyridoxine HCl, and 0.40 g/L glycine brought to volume with D-I H₂O), 0.1 g/L myo-inositol, and 40.0 g/L sucrose (brought to volume with D-I H₂O after adjusting pH to 5.6); and 6 g/L bacto-agar (added after bringing to volume with D-I H₂O), sterilized and cooled to 60° C.

[0266] Medium SB1 comprises MS salts (Gibco/BRL—Cat# 11117-066, 1 pk/L), B5 vitamins stock 1 ml/L, 20 mg/L 2,4-D, 31.5 g/L sucrose, 8 g/L TC Agar, pH 5.8

[0267] B5 Vitamins 1000× Stock comprises 10 g myo-inositol, 100 mg nicotinic acid, 100 mg pyridoxine HCl, 1 g thiamine, D-I H₂O to 100 ml, aliquot and store at −20° C.

G. DNA Isolation from Callus and Leaf Tissues

[0268] Putative transformation events can be screened for the presence of the transgene. Genomic DNA can be extracted from calli, leaves, or other tissue using plant nuclei separation, lysis, and HMW purification, or alternatively using a modification of the CTAB (cetyltriethylammonium bromide, Sigma H5882) method described by Stacey & Isaac (1994 in Methods in Molecular Biology Vol. 28, pp. 9-15, Ed. P. G. Isaac, Humana Press, Totowa, N.J.). Approximately 100-200 mg of frozen tissue is ground into powder in liquid nitrogen and homogenized in 1 ml of CTAB extraction buffer (2% CTAB, 0.02 M EDTA, 0.1 M TrisHCl pH 8, 1.4 M NaCl, 25 mM DTT) for 30 min at 65° C. Homogenized samples are allowed to cool at room temperature for 15 min before a single protein extraction with approximately 1 ml 24:1 v/v chloroform:octanol is done. Samples are centrifuged for 7 min at 13,000 rpm and the upper layer of supernatant collected using wide-mouthed pipette tips. DNA is precipitated from the supernatant by incubation in 95% ethanol on ice for 1 h. DNA threads are spooled onto a glass hook, washed in 75% ethanol containing 0.2 M sodium acetate for 10 min, air-dried for 5 min and resuspended in TE buffer. Five μl RNAse A is added to the samples and incubated at 37° C. for 1 h. For quantification of genomic DNA, gel electrophoresis is performed using a 0.8% agarose gel in 1×TBE buffer. One microlitre of each of the samples is fractionated alongside 200, 400, 600 and 800 ng μl-1λ uncut DNA markers.

### Example 7

### Transformation Results

[0269] Immature Hi-II maize embryos at 8-11 DAP were transformed by particle bombardment essentially as described in Example 6D. Along with the retrofitted BAC DNA construct(s), embryos were co-transformed with ODP2, WUS, and/or ODP2+WUS vectors. At two weeks post-bombardment, transformed cells had proliferated to form an embryogenic callus with multiple somatic embryos. Some of these somatic embryos expressed the fluorescent DsRed2 marker gene indicative of stable inheritance. Individual somatic embryos were excised and propagated as independent transgenic events on Bialophos selection media. Clonally propagated callus culture was established from each event.

[0270] A primary screening of each transformation event was made utilizing FISH. Individual somatic embryos were used to make chromosomal spreads for FISH as described in Example 8. Each event was characterized using separate FISH probes to the mo-PAT/DsRed2 marker (PHP23715), and the CentC tandem centromeric repeat to detect of transgenic marker and centromeric DNA sequence inheritance, respectively.

[0271] Following the primary screening, selected transformation events of interest were transferred to regeneration media to produce plantlets, which were eventually transferred into soil to recover plants. After a period of growth, the selected plants were screened a second time by FISH analysis of root tip squashes to reaffirm inheritance.

### A. Co-Transformation Experiments of Pooled BACs

[0272] The embryos were co-transformed with pools of DNA constructs. These pools can comprise combinations of DNA constructs derived from BAC clones comprising maize centromeric repeats, DNA constructs derived from BAC clones comprising telomeric and/or subtelomeric DNA segments, visual marker plasmid PHP23715, and polynucleotides encoding growth enhancing proteins Ovule Development Protein-2, ODP-2 (PHP21875) and Wushel (PHP21139) plasmids. DNA constructs derived from centromeric BAC clones include BAC clones having CentC only, CRM2 only, CentC and CRM2 only, and core BACs having all four centromeric repeats CentA, CentC, CRM1, and CRM2.

[0273] FISH analysis of 80 calli transformed with pooled BACs comprising centromeric DNA revealed 42 cytogenetically detectable events of new CentC clusters in additional to normal centromere sites. In some instances, the maize centromeric elements used for transformation inserted into the native chromosomes, resulting in dicentric structures. These insertions of centromeric DNA sequences varied in size (number of repeats), number of insertions per chromosome (up to 3 detectable in a single chromosome), and number of chromosomes with insertions (up to 4 chromosomes with at least one insertion) and all insertions co-localized with the RFP marker plasmid probe. This indicates that exogenous DNA fragments can be assembled into large blocks and integrated into a maize chromosome.

B. Transformation with Linear Minichromosome Prototype DNA Constructs Assembled by In Vitro Ligation of a Centromeric BAC Clone, Telomeric Sequences and Marker Sequences.

[0274] The Mo17 BAC clone, bacm.pk128.j21, with inverted orientation of CentC tandem repeats was identified as described in Example 1D. Telomeric sequences were generated by PCR amplification of telomeric oligonucleotides and cloned in a plasmid vector. A linear DNA construct was generated from this BAC clone by in vitro assembly with selectable markers (moPAT, AmCyan1, DsRed2), an 18-26S rRNA NTS replication origin (ori), and telomeric sequences (TEL). Each DNA fragment had recognition sites which allowed assembly of a unique structure upon ligation. The assembled linearized construct comprises:

TEL-(SpeI)-ubi pro::ubi 5′ UTR::ubi intron::AmCyan::moPAT-(NotI)-bacm.pk.128J21-(NotI)-ori-ubi pro::ubi 5′ UTR::ubi intron::DsRed::moPAT-(SmaI)-TEL

[0275] The whole ligation mixture, containing assembled construct as well as by-products of the ligation, was delivered into immature Hi-II embryos via biolistic transformation. More than two hundred events were propagated as individual callus clones based on the fluorescent and selectable marker selection (PAT). Three groups of clones were recovered: those which showed only red (72), only blue (83), or both (137) fluorescent markers. Events expressing both markers were selected for further analyzed by FISH.

[0276] In addition to simple integration events, a number of multiple integration events were observed either in the same chromosome, or in different chromosomes. In two events we observed chromosomal rearrangements. The additional insertion sites of centromeric repeat CentC co-localized with the marker probe PHP23715 suggesting possible dicentric chromosome formation. Analysis of dividing cells at anaphase showed chromosomal bridges consistent with the presence of dicentric chromosomes with two functional centromeres due to integration of exogenous centromeric CentC DNA sequences. Centromeric function is indicated by the formation of dicentric chromosomes, appearance of chromosomal bridges at anaphases, and the induction of chromosomal breaks. These results indicate that the chromosomal elements can self-assemble within the plant cell into multicopy blocks, associate with chromatin proteins, and in some cases can acquire centromeric function.

[0277] One event showed a rearranged chromosome 6 having two insertion sites of the centromeric DNA construct close to the nucleolar organizing region (NOR), as well as one additional minichromosome-like structure with one large centromeric region and one additional small insertion site of the centromeric DNA construct. The cytology of this event may be an indication of chromosomal breakage due to formation of a dicentric chromosome.

C. Transformation with Linearized Retrofitted Pooled BAC Clones

[0278] Several BAC clones were retrofitted with Tn5-3 custom made transposon using the transposase system (EPICENTRE EZ::TN™ pMOD™-2 MCS Transposon Construction Vector system (EpiCentre, Madison, Wis., USA)) essentially as described in Example 5E. They were linearized and used for biolistic transformation of maize Hi-II immature embryos:

1. Seven different variants of retrofitted bacm.pk128.j21 clone with inverted blocks of centromeric CentC repeats representing different transposase-generated insertions into the same BAC clone were pooled;
2. 84 retrofitted centromeric core set BAC clones were combined to generate 4 pools with 21 individual variants each (Table 8). Each of the four pools was used individually for biolistic transformation;
3. Retrofitted centromeric BAC clones from chromosome 4 were divided into 2 pools containing three BAC clones from B73 and three BAC clones from Mo17 (Table 9); and,
4. Pool 1 from Table 8, was divided into 4 subpools of 5 or 6 retrofitted centromeric core set BAC clones (Table 10). Each of the subpools was used individually for biolistic transformation.

TABLE 10

| Subpool 1.1 | Subpool 1.2 | Subpool 1.3 | Subpool 1.4 |
|---|---|---|---|
| bacm.pk007.a2 | bacm.pk133.b10 | bacm.pk119.a23 | bacm.pk075.l6 |
| bacm.pk036.e13 | bacm.pk077.k5 | bacm2.pk174.e4 | bacm.pk0066.j14 |
| bacm.pk178.c10 | bacm2.pk179.b18 | bacm2.pk116.g16 | bacm2.pk099.m24 |
| bacm2.pk179.e1 | bacm.pk0133.b11 | bacm2.pk023.e24 | bacm2.pk093.h11 |
| bacm2.pk064.e15 | bacm2.pk066.m12 | bacm.pk135.l6 | bacm2.pk083.a2 |
| | | | bacm.pk076.m3 |

[0279] For each example above, the Hi-II immature embryos were co-transformed with ODP2, WUS, and/or ODP2+WUS expression vectors and the retrofitted BAC pools.

[0280] Several different classes of integration events were found when linearized retrofitted constructs from BAC clones were used for transformation. For example, when the constructs from the BAC containing inverted blocks of centromeric CentC repeats (bacm.pk128.j21), or retrofitted pools or subpools of the core set of BAC clones were used for transformation:

1. Single integrations into euchromatic regions of host chromosomes;
2. Multiple integrations into euchromatic regions of host chromosomes;
3. Single integrations into centromeric region of host chromosomes;
4. Multiple integrations into centromeric regions of host chromosomes;
5. Integrations which resulted in chromosome breaks, such as new unusual variants of corn chromosomes with reduced chromosomal arms, or duplication of certain chromosomal regions, for example a chromosome 6 with two NORs, or dicentric chromosome formation;
6. Local amplification of marker and centromeric constructs upon integration;
7. Amplification of marker and centromeric constructs into extrachromosomal chromatin segments in some cells;
8. Creation of new minichromosomes having a functional centromere similar to native chromosomes, for example autonomous segregation in mitosis.

[0281] These observations indicate that retrofitted centromeric BAC clone bacm.pk128.j21 and the retrofitted core set of pooled BAC clones are capable of inducing a variety of cytogenetic effects such as dicentric chromosome formation, chromosomal breaks, local amplification of transgenic constructs and formation of extra chromosomal elements, i.e., minichromosomes.

[0282] Successful minichromosome events that resulted from retrofitting of a single BAC or pool of centromere-specific BACs with the Tn5-3 construct and its subsequent linearization into a linear transformation construct are described below:
[0283] 1) Pool 1 core set of centromeric-specific BACs (Table 8), or subpools of Pool 1 (Table 10);
[0284] 2) Pool 3 core set of centromeric-specific BACs (Table 8);
[0285] 3) a single BAC clone, bacm.pk128.j21, with inverted CentC repeats; and,
[0286] 4) three B73 chromosome 4 centromere-specific BAC clones (Table 9).

[0287] The first maize minichromosome event (CMC3 pool 1 event #14) was found among events generated by biolistic transformation with linearized Tn5-3 retrofitted core set BAC pool 1 (Table 8). On selective media actively growing embryogenic callus expressed the DsRed2 visual marker. FISH analyses at metaphase stage showed 0, 1, 2 or 3 additional minichromosomes having various forms and sizes (FIGS. 1-4). In this event, 60 of 80 nuclei surveyed had 1, 2 or 3 minichromosomes along with the normal complement of 20 native chromosomes. These artificial chromosomes ranged in size from about 20% to about 50% of the average native corn chromosome as measured at metaphase. Preliminary measurements at prometaphase show the minichromosomes relatively unchanged in size, while the native chromosomes are about 4-5 times longer, therefore the minichrosomes measured at this stage are about 5% to about 15% of the length of an average native corn prometaphase chromosome. As determined by FISH the minichromosomes are predominantly composed of centromeric repeats and Tn5-3 components. Several examples of ring chromosome formation which have more complex organization were also observed. These newly formed minichromosomes are apparently capable of replication and segregation during mitosis (FIG. 4), however segregation is not perfect and some non-disjunction was observed, resulting in cells with a change in minichromosome number. Callus of CMC3 pool 1 event #14 was kept actively growing under selection for at least 10 months, sampled at various timepoints, and analyzed by FISH to demonstrate stable maintenance of the minichromosome through many rounds of mitotic cell division. This event, CMC3 pool 1 event #14, was also analyzed by FISH for the presence of telomeres using the Telo-31 overgo probes (SEQ ID NOS: 192 and 193) using callus metaphase nuclei. Two to four telo-31 positive foci were observed on each minichromosome, wherein the two foci observed may represent 4 separate foci which cannot be distinguished at this resolution. The intensity of the telo-31 signal was generally weaker on the minichromosome as compared to the signal observed for the native chromosomes in each sample. Plants were regenerated from this event and their root tips were analyzed with FISH to determine if the minichromosome(s) were heritable through successive mitotic divisions in a greenhouse environment. Five of 19 plants regenerated from this transformation event showed the presence of a minichromosome(s). Four plants had a high incidence of nuclei with a single minichromosome plus the normal complement of 20 native chromosomes. The fifth plant had a majority of its nuclei with 1, 2 or 3 minichromosomes plus the normal complement of 20 native chromosomes. All the minichromosomes described above were comprised predominantly of centromeric repeats and Tn5-3 components.

[0288] Subsequently, retrofitted core set BAC pool 1 was further divided into four subpools having 5-6 of the retrofitted core set BAC clones (Table 10). FISH analyses demonstrated the presence of minichromosome(s) in embryonic callus generated by subpools 1.1 and 1.3. Two minichromosome events were produced from subpool 1.1: the first event had the normal complement of 20 chromosomes, plus 1 minichromosome that did not hybridize to PHP23715 marker or CentC at a detectable level; the second event showed 24-28 chromosomes, 3 copies of chromosome 6, and 1 minichromosome. Based on FISH observations, this minichromosome was positive for CentC, but was not consistently positive for the PHP23715 probe. This event may have been produced by integration and breakage of a native chromosome, and/or conditions produced by or resulting from aneuploidy. Subpool 1.3 produced 5 events. Three of the five events appeared to be de novo minichromosome formation and had the normal complement of 20 chromosomes plus 1 minichromosome, and the minichromosomes were positive for PHP23715 marker and CentC by FISH analysis of primary callus events at metaphase. One of these events, CMC3 subpool 1.3 event #27, was further analyzed by FISH for the presence of telomeres using the Telo-31 overgo probes (SEQ ID NOS: 192 and 193) using callus metaphase nuclei. This event has a very small minichromosome with two strong CentC foci and two telo-31 foci on each minichromosome. The two telo-31 foci observed may represent 4 separate foci which cannot be distinguished at this resolution. This event has a smaller minichromosome than observed in previous events. When measured at metaphase, the minichromosome is approximately 0.5 to 1 micron in length, which is about one-third to about one-half of the size of minichromosomes in other independent events. The FISH signal for telo-31 was generally weaker on the minichromosome than on the native chromosomes. Callus of CMC3 subpool 1.3 event #27 has been actively growing under selection for approximately 10 months, sampled at various timepoints, and analyzed by FISH to demonstrate stable maintenance of the minichromosome through many rounds of mitotic cell division. The two other subpool 1.3 events had 19 normal chromosomes plus one minichromosome, possibly as a result of integration and chromosome breakage. Using FISH analysis one of the two minichromosomes was positive for CentC only, and the second one was positive for both PHP23715 marker and CentC. Using FISH on metaphase nuclei of callus, all of the subpool events look essentially similar comparable samples from other minichromosome events generated, as shown in FIGS. 1, 2, 5, 6 and 9. Individual BAC clones from subpool 1.3 were further used to transform immature embryo cells. Two retrofitted vectors, bacm.pk119.a23 and bacm2.pk174.e4, produced minichromosomes. Both events contained a diploid set of maize chromosomes complemented with 1-2 minichromosomes.

[0289] Another minichromosome event was observed (FIGS. 5-8) from a biolistic transformation event of a Hi-II immature embryo with linearized retrofitted core set BAC clones pool 3 (Table 8). The resultant embryogenic callus event was positive on Bialophos selection media and expressed the DsRed fluorescent marker protein. FISH analysis showed that this event was tetra-aneuploid, with only 39 chromosomes were observed because one chromosome 6 was absent. Each nucleus had 0, 1 or 2 minichromosomes in this event. As described with the first minichromosome event from pool 1, the minichromosomes in this event were comprised predominantly of centromeric repeats and Tn5-3 components. At anaphase, the sister chromatids of the minichromosome(s) were able to segregate (FIG. 7) indicating the presence of functional centromeres. The above indicates that the minichromosomes are autonomously replicating and show stability through successive mitotic divisions.

[0290] Another minichromosome event was observed (FIGS. 9-10) from a biolistic transformation event of a Hi-II immature embryo with linearized, Tn5-3 retrofitted BAC clone bacm.pk128.j21. Again, the embryogenic callus of this event was positive on Bialophos selection media and expressed the DsRed fluorescent protein. A plant was regenerated from this event and the root tips screened via FISH. Each nucleus had 0 or 1 minichromosome. In those nuclei with a minichromosome, only 19 of the 20 native chromosomes were observed. FISH analysis on metaphase spreads showed that the single minichromosome was composed primarily of centromeric repeats and Tn5-3 components.

[0291] Another minichromosome event, bCMC4 event #73, was observed from a biolistic transformation event of a Hi-II immature embryo with linearized, Tn5-3 retrofitted three B73 chromosome 4 centromere-specific BAC clones (Table 9). The resultant embryogenic callus event was positive on Bialophos selection media and expressed the DsRed fluorescent marker protein. FISH analysis showed that this event was aneuploid, with only 19 chromosomes and 1 or 2 minichromosomes. Similar to the minichromosomes described above, the minichromosomes in this event were comprised predominantly of centromeric repeats and Tn5-3 components.

[0292] Observations on all minichromosome events indicate that newly formed minichromosomes predominantly resulted from concatenation or/and amplification of the primary linear DNA constructs delivered to the plant cells to produce a de novo minichromosome.

[0293] Three of the minichromosome events were further analyzed utilizing immunofluorescence with a fluorescently labeled antibody raised against the centromere/kinetochore-specific protein, Centromeric Protein C (CENPC). Immunostaining of nuclear spreads revealed that CENPC binds specifically to the centromeric region of native chromosomes. In addition, the CENPC localized to distinct positions on all the minichromosomes in all three minichromosome events studied (FIGS. 3, 4, 8 and 10). Coupling FISH with immunolocalization showed that the CentC repeat and the DsRed2 marker probe localization overlapped with CENPC on minichromosomes. As seen for the native chromosomes, at metaphase the minichromosomes have two distinct foci of CENPC (FIGS. 3, 8 and 10), and at anaphase the sister chromatids of the minichromosomes separate and each sister chromatid has a single foci of CENPC (FIG. 4). The above results indicate that the minichromosomes can recruit the necessary proteins, such as CENPC, for kinetochore formation, and therefore act autonomously of the native chromosomes during replication and segregation into daughter cells during mitosis and meiosis.

[0294] Several thousand bialophos-resistant, DsRed positive maize transgenic events have been generated and at least several hundred were cytologically characterized. The events show a high incidence of integration into the host chromosomes, with about 60% of events showing detectable integration by FISH. Both visual and selectable markers are present in almost 39% of the events, but not detectable by FISH analysis. To date most combinations of recombinant constructs produced minichromosomes containing both markers and CentC repeats detectable by FISH in only about 1% of the events (4 events, FIGS. 1-10). The exception is subpool 1.3 which generated minichromosomes containing both markers and CentC repeats in about 12% of the events analyzed (4 out of 34). BAC clones that successfully produced minichromosomes as described above were used in transformation experiments without co-transformation with ZmODP2 and ZmWUS vectors. Out of over 6,500 embryos initially used for transformation, one hundred and forty-nine recovered events contained integrated BAC sequences, but no minichromosomes were detected.

[0295] Several BAC clones comprising maize centromeric sequences that have produced minichromosome events individually and/or in a pool have been deposited with the Patent Depository of the American Type Culture Collection (ATCC), Manassas, Va., on May 21, 2008 and assigned Patent Deposit Nos. PTA-9213-PTA-9218. These deposits will be maintained under the terms of the Budapest Treaty on the International Recognition of the Deposit of Microorganisms for the Purposes of Patent Procedure. These deposits were made merely as a convenience for those of skill in the art and are not an admission that a deposit is required under 35 U.S.C. §112.

| | ATCC Patent |
|---|---|
| BAC Clone ID | Deposit Designation |
| bacm2.pk174.e04 | PTA-9213 |
| bacm.pk128.j21 | PTA-9214 |
| bacm2.pk116.g16 | PTA-9215 |
| bacm2.pk023.e24 | PTA-9216 |
| bacm.pk119.a23 | PTA-9217 |
| bacm.pk135.l06 | PTA-9218 |

### D. Artificial Minichromosome Size Measurements

[0296] Three of the events with autonomous maize minichromosomes were further characterized by measuring the size of the assembled minichromosome and chromosome 6, which is easily identified by the 18-26S rDNA FISH probe. All measurements were taken on metaphase nuclei, which gave most consistent measurements. Other stages are less defined and highly variable in chromosome size, for example, preliminary measurements at prometaphase show the minichromosomes relatively unchanged in size relative to metaphase measurements, while the native chromosomes are about 4-5 times longer, therefore the minichrosomes measured at this stage are about 5% to about 15% of the length of an average native corn prometaphase chromosome. Therefore, minichromosomes measured at metaphase probably appear larger relative to native chromosomes than if measured at a different stage. Chromosomes were measured using a Leica DMRXA fluorescent microscope, images captured with a Photometrics CoolSnap CCD camera and mesurements taken with Metamorph® image analysis software (Molecular Devices, Sunnyvale, Calif., USA). All measurements are in microns.

Native Chromosome 6 (n=29):

[0297] Mean=4.62 (l) and 2.38 (w)

[0298] Range=3.16-5.78 (l) and 2.06-2.70 (w)

Minichromosome (n=37):
[0299] Mean=1.29 (l) and 1.67 (w)
[0300] Range=0.75-3.07 (l) and 1.12-3.17 (w)

[0301] The maize minichromosomes are on average about 28% of chromosome 6 in length, but can range from about 13-97% of the total length of chromosome 6 at metaphase.

[0302] The size of the maize minichromosomes observed can also estimated in Mb. For example, the corn genome comprises about 2500 Mb total DNA, with chromosomes ranging in size from about 150-350 Mb, chromosome 6 is approximately 200 Mb (Seneca 60).

### E. Cytological Analysis

[0303] Minichromosome composition was analyzed using cytological methods in three events (pool 1 event #14, subpool 1.3. event #27, and bacm2.pk174.e4 event #96) where minichromosomes complemented 20 native maize chromosomes.

[0304] First native chromosomes were karyotyped in both wild type and transgenic cells using a set of repetitive probes similar to those used in Kato et al. (2004) Biochem Biophys Res Commun 321: 280-290. Probes included a non-transcribed spacer of 18-26S rDNA, a 180 bp knob repeat, microsatellite AGT repeat, and a 266 bp subtelomeric repeat, in addition to the CentC repeat. This analysis indicated that no visible chromosomal rearrangements and/or aberrations were present in native chromosomes in all three events. In addition, the minichromosomes did not hybridize to any of the probes except CentC.

[0305] Next, minichromosomes were hybridized with a mixture of five entire BAC-based constructs from subpool 1.3. This probe hybridized across the entire body of the analyzed minichromosomes, indicating they contained a high proportion of delivered DNA molecules. To detect the presence of genomic DNA sequences, we also developed a set of overgo probes specific to the LTR regions of six abundant genomic retroelements, Cinful-1, Grande, Huck, Opie-2, Prem-2/Ji, and Tekay (Mroczek and Dawe (2003) Genetics 165: 809-819). Southern hybridization indicated the presence of at least one of these retroelements in 11 out of 21 BACs from pool1. Four retroelements, Opie-2, Huck, Prem-2, and Grande, which were present in only 5 of 21 BACs, were labeled separately and used in a cocktail to paint chromosomes in minichromosome events. Minichromosomes from the event generated using pool 1 (pool 1 event #14) were found to contain these retroelements, but the origin of these retrotransposones could not be determined since 5 of these 21 pooled BACs hybridize to these sequences in Southerns. Therefore another event (subpool 1.3 event #27) generated using a smaller pool of 5 BACs, among which, only one BAC hybridized to Prem-2 but not to the other three retroelements was analyzed. This event still showed strong, interspersed coverage of the minichromosomes when all four probes were used simultaneously. However, using each of the 4 RT sequences as individual probes produced significantly different patterns. While Huck was highly interspersed across the minichromosome, the remaining three retroelements were present at low levels. For two of the events analyzed in detail, the hybridization results clearly indicated that the introduced BACs and the retroelements were interspersed with each other. For the third minichromosome event analyzed in this manner (bacm2.pk174.e4 event #96), the retroelements covered the entire body of the minichromosome while the BAC sequences covered approximately half.

[0306] Lastly, the events were hybridized with elements retrofitted into the transformation constructs, or provided by co-transformation. Hybridization with the ZmODP2 and ZmWUS probes demonstrated the incorporation of these plasmids into the minichromosomes. The artificial minichromosomes were tested for the presence of telomeric sequences by FISH using a (CCCTAAA)n probe. Telomeric DNA was detected in normal chromosomes and in every minichromosome tested. For example, in CMC3 pool 1 event #14, the larger minichromosome demonstrated the presence of 4 telomeric sequence-positive foci, one at each end of the two sister chromatids.

[0307] We conclude that minichromosomes in some events clearly resulted from chromosomal breakages, while observations made on other events were consistent with the possibility that the minichromosomes formed de novo.

### Example 8

### Methods

[0308] DNA isolation from immature ears or green leaves of maize plants was performed essentially as described in Ananiev et al. (1997) Proc Natl Acad Sci USA 94:3524-3529. BAC clone DNA was isolated using the Nucleobond plasmid kit (BD Biosciences Clontech, California) according to the manufacturer's recommendations. High molecular weight DNA preparation in agarose blocks was performed essentially as described in Liu and Whittier (1994) Nucl Acids Res 22:2168-2169. DNA restriction digestions, gel electrophoresis, Southern blotting, and filter hybridization were carried out using standard techniques as described in Sambrook et al. (1989) Molecular Cloning: A Laboratory Manual, 2nd Ed., Cold Spring Harbor Laboratory Vols. 1-3. The above references are all herein incorporated by reference.

### A. Overgo Probe Labeling for Colony and Southern Hybridization

[0309] Pooled overgos for each probe (5 μmol of each oligo) were combined with 2 μl of 10× Klenow buffer, 1 μl of Klenow enzyme (5 U/μl), 1 μl of 1 mM dGTP, 1 μl of 1 mM dTTP, [α-³²P]dCTP and [α-³²P]dATP—5 μl each, and sterile water to a final volume of 20 μl. The reaction mixture was incubated at 14° C. for 2 hours. Incorporation percentage was calculated and was considered acceptable at 50% or greater.

### B. Membrane Preparation and Hybridization

[0310] Membranes were prepared using 432 384-well plates evenly distributed between the Mo17 EcoRI and HindIII BAC libraries. A 4×4 gridding pattern that allowed 96 plates with 384 wells to be spotted onto a single Millipore Imobilon N+ nylon membrane (Bedford, Mass.) was used. The 96 plates gridded comprised 90 BAC clone plates and 6 plasmid clone plates used as gridding markers. After gridding, membranes were carefully placed bacteria side up on Luria-Bertani agar plates with 17 μg/mL chloramphenicol, the plates were covered, inverted, and grown at 37° C. overnight. After colony growth the membranes were removed from the plates and denatured in 1.5 M NaCl and 0.5 M NaOH for 5 min each, followed by neutralization in 1.5 M NaCl, 1 M Tris-HCl two times for 5 min each. Membranes were dried and treated with Proteinase K (100 mls at 1 mg/mL; Sigma, St. Louis, Mo.) for 50 min at 37° C.

[0311] Each membrane was soaked in 6×SSC, 0.5% SDS solution in plastic boxes. Filters were prehybridized at 56° C. in 6×SSC, 0.5% SDS with constant agitation for at least 20 minutes. Pooled overgo probes were denatured at 100° C. for 5 min and added to the hybridization solution which had been used for prehybridization. Hybridization was for 12-16 h at 56° C. Membranes were washed progressively for 1 h each at 56° C. in 2×SSC and 0.1% SDS (wash 1), 1.5×SSC and 0.1% SDS (wash 2), and 0.1×SSC and 0.1% SDS (wash 3). Membranes were sealed in plastic wrapped and exposed to X-ray film for 3 h to overnight. Following hybridization, the filters were stripped in 100 ml of 0.1×SSC and 0.1% SDS at 90° C. for 10 min and stored at −20° C. Membranes were used multiple times.

### C. Cytological Methods

[0312] Any suitable cytological methods, and compositions, including many standard cytological methods, preparations, and like are known in the art and can be used to examine plant tissues.

i. Preparation of Nuclei from Maize Callus Tissue
[0313] 1. Calli used for making nuclear preparations were first gassed with nitrous oxide at 150 psi for 3 hours then immediately fixed. Nitrous oxide arrests nuclei at metaphase which allows for improved chromosomal spreads for FISH analysis.
[0314] 2. Fix the callus tissue sample in 50% acetic acid for at least 1 hour. Tissue can be stored indefinitely in 50% acetic acid at −20° C.
[0315] 3. Separate somatic embryos from callus and place in 50 μl drop of PIM buffer (50 mM CaCl₂, 10 mM sodium acetate, pH 5.8) in a small petri plate.
[0316] 4. Dissect somatic embryos into smaller pieces of 0.5 mm.
[0317] 5. Wash tissue in PIM buffer 3-5 times over 1 hour to remove fixative. Slowly pipette several times to wash and replace with fresh PIM buffer.
[0318] 6. Carefully remove PIM buffer. Add 50 μl enzyme digest solution (2% w/v cellulase (Cat# CEL, Worthington Biochemical Corp. (Lakewood, N.J., USA)), 0.2% w/v pectinase (Cat# PASE, Worthington Biochemical Corp. (Lakewood, N.J., USA)); 0.5% w/v bovine serum albumin)
[0319] 7. Digest tissue at room temperature, in the dark, in a moist chamber for 1-2 hours. As the tissue begins to soften, very gently pipette and/or squash with probe to break up larger pieces and release cells.
[0320] 8. Carefully remove enzyme digest solution and replace with about 50 μl PIM buffer.
[0321] 9. Transfer free cells/nuclei to a microfuge tube. Add more PIM buffer to remaining digested tissue and gently pipette to release cells, transfer these cells to the microfuge tube, repeat as needed.
[0322] 10. Pellet cells in microcentrifuge at 500 rpm for 3 minutes, remove supernatant. Add fresh PIM buffer and gently resuspend cells. Repeat this wash step 3 more times.
[0323] 11. Remove PIM buffer and replace with 50% acetic acid. Gently resuspend cells, pellet at 500 rpm for 10 min., remove supernatant and add 50% acetic acid. Repeat.
[0324] 12. Store isolated nuclei in 50% acetic acid at −20° C. The final volume of 50% acetic acid should be 2× the volume of the nuclear pellet.
[0325] 13. Transfer 5 μl of resuspended nuclei to a glass slide, add an 18 mm² coverslip.
[0326] 14. Heat slide on a hot plate at 70° C. for 15 seconds.
[0327] 15. Remove slide from heat and gently press down on coverslip to squash the nuclei.
[0328] 16. Allow the slide to cool briefly, then dip slide in liquid nitrogen for 10-15 seconds.
[0329] 17. Remove slide from liquid nitrogen and warm coverslip with your breath.
[0330] 18. Quickly remove coverslip with the edge of a razor blade.
[0331] 19. Place slide in 2 changes of 100% EtOH for 2 minutes each.
[0332] 20. Allow slides to air dry. Store slides at −20° C. until needed.
   ii. FISH followed by Direct Immunolocalization of Nuclei

[0333] a. Overgo Probe Preparation for FISH

Overgo probes are described in Table 1.
1. Add 10 μl of 100 μM overgo mix, comprising equal concentrations of each overgo, to 5 μl of deionized water.
2. Heat at 95° C. for 1 min, then transfer to ice.
3. Add to the above mixture:
[0334] 2 μl 10×DNA polymerase buffer (100 mM Tris-HCl, pH 7.5, 100 mM MgCl₂, 7.5 mM DTT)
[0335] 0.5 μl dUTP fluorophore
   [0336] a) dUTP-Cy3 (Amersham)
   [0337] b) dUTP-FITC (Roche)
   [0338] c) dUTP-Texas Red (Molecular Probes)
[0339] 2 μl dNTPs (200 μM A-, G-, CTP; 40 μM TTP)
[0340] 0.5 μl Klenow

### 4. Incubate at 37° C. for 20 min.

[0341] 5. Clean probe using Quigen Nucleotide Extraction kit. Elute in 50 ml of 50% formamide in kit elution buffer.

[0342] b. Fluorescent In Situ Hybridization (FISH)

FISH of maize nuclei on slides was done essentially as follows:
1. Fix slide 10 min. in 1% v/v paraformaldehyde in phosphate-buffered saline (PBS) pH 7.2

### 2. Wash 2×5 min. in PBS

[0343] 4. Wash 2 min. in distilled/deionized water
5. Air dry slide
6. Hybridize 2 min at 80° C. in titrated fluorescent probe in 50% formamide in a final concentration of 50 mM MgCl₂
7. Hybridize 30 min—overnight in moist chamber at 37° C.

### 8. Wash 5 min. in 2×SSC

### 9. Wash 5 min. in 0.2×SSC

[0344] 10. Air dry slide
11. Add Vectashield® with DAPI (Cat# H-1200, Vector Laboratories, Burlingame, Calif., USA) and coverslip (5 ml mounting media/22 mm coverslip)
12. Examine under microscope using appropriate filter sets and/or immersion oil as needed.

[0345] c. Immunolocalization

[0346] After examination and characterization of FISH probe localization, these same samples can be processed and used for immunolocalization using an direct-tagged antibody probe. Immunolocalization of fluorescent-tagged polyclonal rabbit anti-CENPC antibody was done essentially as follows:

1. Remove coverslip
2. Wash 5 min. in 70% v/v EtOH to remove mounting medium and immersion oil

### 3. Wash 3×5 min. in PBS

[0347] 4. Block 1 hour at 37° C. in a moist chamber in 5% v/v normal rabbit serum (Jackson Immunoresearch, West Grove, Pa., USA) in PBS-BT (PBS with 3% w/v BSA, 0.02% w/v Na azide, 0.5% v/v Triton X-100)

### 5. Rinse in PBS

[0348] 6. Incubate overnight at 37° C. in a moist chamber with 1° antibody in 5% v/v normal rabbit serum in PBS-BT. Rabbit anti-CENPC-Cy3 (or -FITC) was used at a 1:200 dilution, final concentration 2.5 μg/mL of labeled antibody.
7. Wash 3× in PBS over 1 hour period
8. Air dry slide
9. Add Vectashield® with DAPI (Cat# H-1200, Vector Laboratories, Burlingame, Calif., USA) and coverslip (5 ml mounting media/22 mm coverslip)
10. Seal coverslip with nail polish
11. Examine under microscope using appropriate filters and/or immersion oil as needed.

[0349] d. CENPC Antibody Production and Labeling

[0350] A maize homologue of mammalian CENPC was isolated by Dawe et al. ((1999) Plant Cell 11:1227-1238) and shown to be a component of the kinetochore in maize. A 20 amino acid conserved peptide from the amino terminal domain was synthesized and used for polyclonal antibody production in rabbits (Openbiosystems, Huntsville, Ala., USA). The resulting antibodies were directly labeled with fluorophores suing the Fluorolink-AbCy3 labelling kit (GE Healthcare, UK) or Fluorescein Protein labelling kit (Roche Diagnostics Corp., Indianapolis, Ind., USA).

iii. Fiber-FISH

[0351] Extended DNA fibers on cytological slides were prepared as described in Jackson et al. (1998) Genome 41:566-572. Probes for fiber-FISH were labeled with biotin-11-dUTP (Roche, Germany) or DIG-dUTP (Roche, Germany) using Nik Translation Labeling Kit (Roche, Germany) according to manufactures recommendations. After precipitation, the probes were re-dissolved in TE buffer and stored at −20° C. For fiber-FISH, the probes were hybridized to DNA fibers in a mixture of 50% (v/v) formamide, 10% (v/v) SDS, and 2×SSC in a final volume of 10 μL. The slides were covered with cover slips, sealed with rubber cement and incubated at 80° C. for 2 min to denature both the probes and the target DNA, followed by incubation at 37° C. The post-hybridization washes and signal detection were performed as described by Zhong et al. (1996) Plant Mol Biol Rep 14:232-242. The biotin-labeled probes were detected with fluorescein-avidin DN (Vector Laboratories, Burlingame, Calif., USA), biotinylated anti-avidin D (Vector Laboratories, Burlingame, Calif., USA) and again with fluorescein-avidin DN (Vector Laboratories, Burlingame, Calif., USA). The DIG-labeled probes were detected by mouse anti-DIG monoclonal antibodies (Jackson ImmunoResearch, West Grove, Pa., USA) and Cy3-conjugated anti-mouse antibodies in sheep (Jackson ImmunoResearch, West Grove, Pa., USA). The slides were then mounted in Vectashield mounting medium (Vector Laboratories, Burlingame, Calif., USA). Preparations were examined using a Leica DMRXA fluorescent microscope, images captured with a Photometrics CoolSnap CCD camera. Images were captured using Metamorph® image analysis software (Molecular Devices, Sunnyvale, Calif., USA). Fiber-FISH was performed on 3 to 5 preparations from each line.

### D. Centromeric BAC Sequencing

[0352] Any sequencing method can be used to obtain sequence information from BAC clones or other constructs containing centromeric sequence, however the size of the clones and repetitive nature of centromeric sequences can pose technical challenges for DNA handling, preparation, sequencing, and sequence assembly into contigs.

[0353] All centromeric BAC sequences were determined by a shotgun approach using paired-end reads derived from a randomly generated sublibrary (Messing et al. (1981) Nucl Acids Res 9:309-321; Edwards et al. (1990) Genomics 6: 593-608). BAC DNA was isolated from overnight 2xYT+cloramphenicol cultures and randomly sheared by nebulization. Sheared DNA fragments were end-repaired using a combination of T4 polymerase and Polynucleotide kinase (EndRepair kit, Epicentre) and separated by agarose gel electrophoresis. DNA fractions in the range of 2 to 4 kb were recovered from gels using a gel extraction kit (Qiagen, Inc.) and subcloned into dephosphorilated, EcoRV-digested pBluescript II SK(+) (Promega). The ligation product was electroporated into DH-10B E. coli cells. Individual colonies were picked into 384-well microtiter plates with an automatic Q-Bot colony picker (Genetix) and stored in freezing media containing 6% glycerol and 100 μg/ml ampicillin.

[0354] For sequencing, individual plasmids were amplified directly from arrayed cultures using the Templiphi DNA method (GE Biosciences; Dean et al. (2001) Genome Res 11:1095-1099; Nelson et al. (2002) Biotechniques 32:S44-S47). The amplified products were diluted, denatured at 95° C. for 10 min and end-sequenced using M13 universal primers and the BigDye 3.1 fluorescent kit (ABI). Sequencing products were resolved on an ABI 3730xl automated sequencer. Individual sequences were assembled with the Phred/Phrap package (Ewing et al. (1998) Genome Res 8:175-185) and assembled contigs viewed with Consed (Gordon et al. (1998) Genome Res 8:195-202). Contig order and accuracy of the Phrap-based assembly was confirmed with Exgap (developed by A. Hua, University of Oklahoma).

[0355] Full sequence of bacm.pk128.j21 was also performed by random transposition sequencing using the template Generation System II (TGS II, Finnzymes). Direct sequencing using specific primers was also performed to resolve contig orientation and sequence gaps.

| BAC ID | Group | Source | #Contigs | SEQ ID NOs |
|---|---|---|---|---|
| bacm2.pk170.a08 | Core Set | Mo17 | 49 | Seq ID |
| | | | | 194-242 |
| bacb.pk243.l15 | Inverted CentC | B73 | 81 | Seq ID |
| | | | | 243-323 |
| bacm.pk147.d02 | Core Set | Mo17 | 50 | Seq ID |
| | | | | 324-373 |
| bacm.pk184.c21 | Ch 4 | Mo17 | 23 | Seq ID |
| | | | | 374-396 |
| bacm.pk024.f21 | Core Set | Mo17 | 40 | Seq ID |
| | | | | 397-436 |
| bacm.pk155.l13 | Core Set | Mo17 | 83 | Seq ID |
| | | | | 437-519 |
| bacm.pk010.m07 | Ch 4 | Mo17 | 47 | Seq ID |
| | | | | 520-566 |
| bacm.pk007.b16 | Core Set | Mo17 | 24 | Seq ID |
| | | | | 567-590 |
| bacm.pk128.j21 | Inverted CentC | Mo17 | 13 | Seq ID |
| | | | | 591-603 |
| bacm.pk108.h15-2 | Ch 4 | Mo17 | 48 | Seq ID |
| | | | | 604-651 |
| bacm.pk044.a19 | Core Set | Mo17 | 12 | Seq ID |
| | | | | 652-663 |
| bacb.pk155.h15 | Ch 4 | B73 | 31 | Seq ID |
| | | | | 664-694 |
| bacm.pk128.j21 | Inverted CentC | Mo17 | 2 | Seq ID |
| | | | | 695-696 |
| bacm2.pk023.e24 | subpool 11-15 | Mo17 | 9 | Seq ID |
| | | | | 697-705 |
| bacm2.pk116.g16 | subpool 11-15 | Mo17 | 23 | Seq ID |
| | | | | 706-728 |
| bacm2.pk174.e04 | subpool 11-15 | Mo17 | 16 | Seq ID |
| | | | | 729-744 |
| bacm.pk135.l06 | subpool 11-15 | Mo17 | 19 | Seq ID |
| | | | | 745-763 |
| bacm.pk119.a23 | subpool 11-15 | Mo17 | 47 | Seq ID |
| | | | | 764-810 |

What is claimed is:

1. An artificial plant minichromosome comprising a functional centromere that specifically binds centromeric protein C (CENPC), wherein the minichromosome specifically hybridizes under stringent hybridization conditions to a polynucleotide selected from the group consisting of:
(a) a polynucleotide comprising at least one plant centromeric element, wherein the polynucleotide is selected from the group consisting of bacm.pk128.j21, bacm2.pk023.e24, bacm2.pk116.g16, bacm2.pk174.e04, bacm.pk135.l06, and bacm.pk119.a23;
(b) a polynucleotide comprising at least one plant centromeric element, wherein the polynucleotide is provided in an American Type Culture Collection deposit selected from the group consisting of ATCC designations PTA-9214, PTA-9213, PTA-9215, PTA-9216, PTA-9217, and PTA-9218;
(c) a polynucleotide comprising a nucleic acid sequence from bacm2.pk170.a08, wherein the polynucleotide is selected from the group consisting of SEQ ID NOS: 194-242;
(d) a polynucleotide comprising a nucleic acid sequence from bacb.pk243.l15, wherein the polynucleotide is selected from the group consisting of SEQ ID NOS: 243-323;
(e) a polynucleotide comprising a nucleic acid sequence from bacm.pk147.d02, wherein the polynucleotide is selected from the group consisting of SEQ ID NOS: 324-373;
(f) a polynucleotide comprising a nucleic acid sequence from bacm.pk184.c21, wherein the polynucleotide is selected from the group consisting of SEQ ID NOS: 374-396;
(g) a polynucleotide comprising a nucleic acid sequence from bacm.pk024.f21, wherein the polynucleotide is selected from the group consisting of SEQ ID NOS: 397-446;
(h) a polynucleotide comprising a nucleic acid sequence from bacm.pk155.l13, wherein the polynucleotide is selected from the group consisting of SEQ ID NOS: 437-519;
(i) a polynucleotide comprising a nucleic acid sequence from bacm.pk010.m07, wherein the polynucleotide is selected from the group consisting of SEQ ID NOS: 188, and 520-566;
(j) a polynucleotide comprising a nucleic acid sequence from bacm.pk007.b16, wherein the polynucleotide is selected from the group consisting of SEQ ID NOS: 567-590;
(l) a polynucleotide comprising a nucleic acid sequence from bacm.pk128.j21, wherein the polynucleotide is selected from the group consisting of SEQ ID NOS: 191, 591-603, and 695-696;
(m) a polynucleotide comprising a nucleic acid sequence from bacm.pk108.h15-2, wherein the polynucleotide is selected from the group consisting of SEQ ID NOS: 186-187, and 604-651;
(n) a polynucleotide comprising a nucleic acid sequence from bacm.pk044.a19, wherein the polynucleotide is selected from the group consisting of SEQ ID NOS: 652-663;
(o) a polynucleotide comprising a nucleic acid sequence from bacb.pk155.h15, wherein the polynucleotide is selected from the group consisting of SEQ ID NOS: 664-694;
(p) a polynucleotide comprising a nucleic acid sequence from bacm2.pk023.e24, wherein the polynucleotide is selected from the group consisting of SEQ ID NOS: 697-705;
(q) a polynucleotide comprising a nucleic acid sequence from bacm2.pk116.g16, wherein the polynucleotide is selected from the group consisting of SEQ ID NOS: 706-728;
(r) a polynucleotide comprising a nucleic acid sequence from bacm2.pk174.e04, wherein the polynucleotide is selected from the group consisting of SEQ ID NOS: 729-744;
(s) a polynucleotide comprising a nucleic acid sequence from bacm.pk135.l06, wherein the polynucleotide is selected from the group consisting of SEQ ID NOS: 745-763; and,
(t) a polynucleotide comprising a nucleic acid sequence from bacm.pk119.a23, wherein the polynucleotide is selected from the group consisting of SEQ ID NOS: 764-810; and,
(u) a polynucleotide having at least 90% sequence identity to the polynucleotide of any one of (a)-(t).

2. The artificial plant minichromosome of claim 1 wherein said minichromosome further comprises at least one functional telomere.

3. The artificial plant minichromosome of claim 1, wherein the minichromosome is between at least about 5 Mb to about 50 Mb.

4. A plant cell comprising the artificial minichromosome of claim 1.

5. The plant cell of claim 4, wherein the plant cell is selected from the group consisting of maize, rice, wheat, oat, barley, sorghum, millet, soybean, sunflower, safflower, Brassica, alfalfa, cotton, and Arabidopsis.

6. The plant cell of claim 5, wherein the plant cell is from maize.

7. A plant comprising the artificial minichromosome of claim 1.

8. The plant of claim 7, wherein plant is selected from the group consisting of maize, rice, wheat, oat, barley, sorghum, millet, soybean, sunflower, safflower, Brassica, alfalfa, cotton and Arabidopsis.

9. The plant of claim 8, wherein the plant is maize.

10. An artificial plant minichromosome comprising a functional centromere that specifically binds centromeric protein C (CENPC), wherein the functional centromere comprises:
at least two arrays of tandem repeats of CentC in an inverted orientation wherein the first array comprises at least fifty copies of CentC and the second array comprises at least fifty copies of CentC; and, at least one copy of a retrotransposable element, wherein the retrotransposable element is situated between the first and the second array,
wherein the minichromosome specifically hybridizes under stringent hybridization conditions to a polynucleotide selected from the group consisting of:
(a) a polynucleotide from bacm.pk128.j21;
(b) a polynucleotide provided in American Type Culture Collection deposit designation PTA-9214;
(c) a polynucleotide comprising a nucleic acid sequence from bacm.pk128.j21, wherein the polynucleotide is selected from the group consisting of SEQ ID NOS: 191, 591-603, and 695-696; and,
(d) a polynucleotide having at least 90% sequence identity to the polynucleotide of any one of (a)-(c).

11. The artificial plant minichromosome of claim 10, wherein the retrotransposable element is selected from the group consisting of CentA, CRM1, and CRM2.

12. The artificial plant minichromosome of claim 10, wherein said minichromosome further comprises at least one functional telomere.

13. The artificial plant minichromosome of claim 10, wherein the minichromosome is between at least about 5 Mb to about 50 Mb.

14. A plant cell comprising the artificial minichromosome of claim 10.

15. The plant cell of claim 14, wherein the plant cell is selected from the group consisting of maize, rice, wheat, oat, barley, sorghum, millet, soybean, sunflower, safflower, Brassica, alfalfa, cotton, and Arabidopsis.

16. The plant cell of claim 15, wherein the plant cell is from maize.

17. A plant comprising the artificial minichromosome of claim 10.

18. The plant of claim 17, wherein plant is selected from the group consisting of maize, rice, wheat, oat, barley, sorghum, millet, soybean, sunflower, safflower, Brassica, alfalfa, cotton and Arabidopsis.

19. The plant of claim 18, wherein the plant is maize.

The application's sequence listing, which the Patent Office published only in electronic form, follows.

SEQUENCE LISTING (810 sequences)

SEQ ID NO: 1 - DNA, 4635 bp, Zea mays
  source (1)...(4635): CentA
tgatgagaacataacccgcacagatatgaccatgttaatggctcctgctacaaagacattgaggaacaaagaagttgattggggaccaagtaatgatatttccaacatttccaacaaagcaagcacatcatcaaatttaaagatatacttgggtgaggagcatacactagagtcgaggacgactctattacaagaaggggaggatgatgaggacatcactgccatcaatacaccacaccagcgacctccttcaccatttaataatggaccagtaaacgagtccgtgcacgtaaattttattatcaggtgaactcgttccttattgttgaagctaatcattccttaaatgaggtactaataccttgtgattactttattaatctaaggtgtttgggaggtgaaccatctagaatttgagaaggcaacaaggcaataaaagctgctccacttgaggggatttcgaaactacaacaagtgcaagtttaagagggcatatctttcagctcctaaggttgtttaatgcaaataagcacttgttggaaaggtctctttgtctactttctagtggatcaagaatcaacgagagatcagacactaagtgtccagaaactgccgagtgaactcctgctctacccaagtcaatttcgtaactgcagcatgcaccaaattaaatggagcataactttccactcccaaggttgtttagtgcaaataactacttgttggaaagctctcttcgtctactttcatgtgcatcaataatcaatgacagaaaccaaacgaggcgtccagaaactgccgagagagtttcgttctccattagaactcctttctattcctctatttaagcaactagcagccaccaaagaacttgggtttttgtttgatgtaagtttagcctttgctacttccttgtaaacgcatgtgtcggctagaccacccggatacttgaaacagaaccccaactctatcagatccgtgagtgtctgctttttatcttgttcttgcttgttctcgattgcttgcaggttcaaggctgttcttggcacggcaagggcagcaacaacaggagccgatgtaactatcgctaaggcgcagcacccttgtggttgttgtagtcggatagcacaacgtcgacctccaccccaaatcgtagttatcaggagacggtgtacctgtcgctcaaggcgccacaccatcttggttgtggtagtcgggcagccaacgtcgttctccaacaagtttccacctccatcatctctcatcgaaagatcgggcacccttctacccgttgggtttatcaagtggtatcaaatttcaggttgctcggtgagagatctcaatcttccttgttttgtttacctacagtccacttttgcccaaagatatatttagagcagaaattcacctaaaaacagtttgagcctttgctttactacttagttttcgacttgttgaattccggtagctgcatttgggtcgagttgctggtctaaagttttcttaccgctagagtttcgagttcgcgccaccttgtttcaatcaccagtttagacctcttgctgcaattcaaccaaaaagaagagaaagcaaaaggcgagtgcacaaaaaaagccgcactaatcagcaaaacaaaaaaagacacgtgcaaaacaaaagagagagaaaaaaaccagttctgaattttggtagataaaatttgtaagtgcaacaaaacaaaaggcagtttgtgtgccttctttttatagtttcagaaatcagattgttgttctgagcttttggtgatactatttgtgtaacggctcgcgtctctattacggtttggactaggaccagcacaacaccttgtggaacgtttattcaacttgttgtggctaacgtggtactagctattccttggaactattgtttaaacagccacctataaatccacaaaattttctacaacaccaccaggttgtgctagcagccactgttgttgttgttcgtgctgtttgccagcgcctcctgctttgcgtggtgagaacttgtaagaacttgtttaaccagtttgagagtgagagattacaacaatgattcctagtagtttatagaatcaaagatattttttattgtttcttgtctttactaaacatggcaggtgatatggacatttttgacccaaccgaacgttatattggaggcatcattcaacacttgcctttatatgccggtaaattcgatcctcatgcatacattgattgggagctaaagctagataaggaatttgataagcatgatctatctcaaaaacaaaagatttatattgcctctaatttgttaactgagcacgcattgatggaatggaaatacatttgtaggcacaacaaagttccacaatcttgggaagacttcaaacttcattttagagatgcattcattcctgcatactatgctgatcatttgctttctaaattagacaccttaaagcagggtgctaggactgtgaaagattattattatgattttaaaatttttaccatgtttgctcgtttagatgaatgcatggaagatgtcatgactaggttcatgaaaggactcaattctgaaattcagactatagtcatgcatgaagcatacaaacacatttctcacttgtttttgcttgcatgtaaagctgaaaatgagattctattatacaattatacaagcactgaacatgtgagccataattcctcttttgcatcttctctacatgctgatcaagaacacaaaataatgaaaccagctgttgtttttccatcatcacaagaagaattgattgctgacacttgtgatagtgaagatttgtgggataatgattcacatgtactaagacaacaactagtaaatgaacatgttacatctattattgaaccaaacattttggctaaaaaggaacatgtaatttgtattgcaaacgaaactgaagaaataaatttgctctcttctttaaatacttggggctatattgaatttgatgatctttttgagctcggtaatttggaaaatattttatttgctagattcaactataccatgtccttctcatgatatattttatattgctggcaagtacaacaacataggacaatttcttgtgcatagaatttctatttcatctagatatgttgtttcttcactttgtgcaaataagatattggtatgttctcaagaagaaaagaatctcttgtttccatgtactttagttgaagtttcaggtttatatttgaaagacattaataaaagcttagtcatcaacatcaatcatgatgcaaaaccgaggacggtttgctatcaagaaggggagaatgatgagaacataacccgcacagatatgaccatgttaatggctcctgctacaaagacattaaggaacaaagaagttgattggggaccaagtaatgatattttcaacatttccaacaaagcaagcacatcatcaaatttaaagatatacttgggtgaggagcatacactagagtcgaggacgactctattacaagaaggggaggacgatgaggacatcactgccatcaatacaccacaccagcgacctccttcaccatttaataatggaccagtaaacgagtccgtgcacgtaaatttaattatcaggtgaactcgttccttgttgttgaagctaatcattccttaaatgaggtactaataccttgtgattactttattattctaaggtgtttgggaggtgaaccatctagaatttgagaaggcaacaaggcaataaaagttgctccacttgaggggatttcgaaactacaacaagtgcaagtttaagagggcatatctttcagctcctaaggttgtttaatgcaaataagcacttgttggaaaggtctctttgtctactttctagtggatcaagaatcaacgagagatcagacactaagtgtccagaaactgccgagtgaactcctgctctacccaagtcaatttcgtaactgcagcatgcaccaaattaaatggagcataactttccactcccaaggttgtttagtgcaaataactacttgttggaaagctctcttcgtctactttcatgtgcatcaataatcaatgacagaaaccaaacgaggcgtccagaaactgccgagagagtttcgttctccattagaactcctttctattcctctatttaagcaactagcagccaccaaagaacttgggtttttgtttgatgtaagtttagcctttgctacttccttgtaaactcatgtgtcggctagaccacccggatacttgaaacaaaaccccaactctatcagatccgtgagtgtctgctttttatcttgttcttgcttgttctcgattgcttgcaggttcaaggctgttcttggcacggcaagagcagcaacaacaggagccggtgtaactatcgctaaggcgcagcacccttgtggttgttgtagtcggatagcacaacgtcgacctccaccccaaatcgtagttatcaggagacggtgtacctgtcgctcaaggcaccacaccatcttggttgtggtagtcgggcagccaacgtcgttctccaacaagttttccacctccatcatctctcatcgaaagatcgggcacccttctacccgttgcgtttatcaa

SEQ ID NO: 2 - DNA, 156 bp, Zea mays
  source (1)...(156): CentC
ggttccggtggcaaaaactcgtgctttgtatgcaccccgacacccgttttcggaatgggtgacgtgcgacaacgaaattgcgcgaaaccaccccaaacatgagttttggacctaaagtagtggattgggcatgttcgttgcgaaaaacgaagaaat

SEQ ID NO: 3 - DNA, 6915 bp, Zea mays
  source (1)...(6915): CRM1
cttggtcttggacagtacctcactgatgaagtagacctgatgaagctgaggtgcccgatctttcggcgagtagagataattccgatttggcggaagatgacccttgcgatccgactacgacgagcaagcccgaggcgccaatgcaatcgctgaaccaactccctgtggttaccgaccttgctgatgcgagatcggcctgatcacgaagatcgtttcctgtgcgcaatcgaagaacgaacaagaataagatgcgagcaatctaatctattactcgagggtggagttctgaatacacgaagacagcgcagattagcgcgtgttcgagagtagctaaggctaacgtaaaacaaaactcaggaaataaaggaggcgcagctcctgaataaatagagagggggcgcagcccctaggggcggccaaccctaggtcgtccattatgggccgcaattgggctggtcgtctattcttccgggccttcgttctttaacaacatgatgtagttcaattctcttgcacgggcccgagtcactggcccaggtggaaggggtggcgcctgggctggagaaggtgctgctggtgtagatgtgctcgtgttggtgttgatgtccgcatcatcctccccttcttgaactgaagtcgtcctcgacggcaactcctcatcttctcccgcatacggtttcaaatctgcaacattaaaactagtggaaacaccaaactccgcaggtaggtcgagggtataagcattatcattaatcttggttagtatcttaaaaggaccagcagcacgaggcatcaatttagaacggcgcaaagtaggaaaacgatcctttctcaaatgcaaccaaaccatatcaccaggttcaaaagtaacatgttttcttcctttactaccagcaacctgattttttgtattagtagcagcaatgttctgtttcgtttgttcatgtatggtaatcatttgttcaacatgtgcagaagcatctacatgtggggcgttcgcagcattaagtgaaatcaaatcaataggtgccctaggaatgtaaccataaacaatctggaaagggcacatctttgtagaagaatgcgtggcatgattgtaagcaaattcaacatgaggcaagcaatcctcccaacgtcgcaaattcttgtctaaaacagccctaagcatggtagataaagttctatttactacctcagtttgtccatcagtttgagggtgacaagtagtgctaaacaacaatttagttcccaatttattccaaagagatctccaaaaatggcttagaaacttagcatcgcgatcagagactattgtttttggaataccatgtaaacgaataatttctctaaagaacaattcagcaacaatgctagcatcatcagttttatgacaaggtataaagtgagccattttagagaatctatcaacaaccacaaaaatactatccctccccttcttagttctaggcaagcccaaaacaaagtccatagagatatcaagccaaggagaagaagggacaggcaaaggcatatacaaaccatggttgttcaaccgtgacttagctttctgacaagtagtgcagcgtgcaacaaggcgctccacatcagcgcgcatccgaggccaaaagaagtgggcagccaacacctcatgtgtcttgtagacgccaaaatgccccatgagaccgcctccatgcgcttcctgtaacaacaaaagacgaaccgagctagctggaacacacagcttgttagcgcgaaacaggaacccatcctgtatgtgaaatttgccccatggttttccattaatacaatggccgaaagcatctttaaaatcagcatcgtcaacatattgatccttcacagtgtccaaaccaaagattttaaaatctaactgtgacagcatggtatagcgacgagacaaagcatcagcaataacattgtccttcccgttcttgtgtttaataatgtaaggaaaggactcaatgaattctacccatttagcatgacgacggttcagatttgtttgggtacgaatatgttttaaagcctcatgatcagaatggattatgaactcacgatgccaaagatagtgctgccatgtatgcaaagtgcgcactaaagcgtaaagctccttatcataagtagaatatttcagactagcaccgcttaatttttcactaaaataagcaactggttttccttcttgtaacaaaacagcacccagcccaataccactagcatcgcattcaagctcgaaaactttattaaaatcaggcaattgcaagaggggagcttgggttaacttatctttcaaagtgctgaacgctacctcctgcgaatcactccaggcaaacggcacatctttctttgtaagctcatgtagaggcgctgcaatggagctaaaatcacgaacaaatctgcggtagaaaccggcaagtccaagaaagctccgaatttgtgtgaccgtcgtcggtgtaggccactcccgaatggcagcaatcttgctgctatccacctcaatgccctgcggagtaaccacataaccaagaaacgagacacgttgcgtgcaaaatgtgcacttttccatgttaccaaacaagcgagcagcacgcaaagcgtcaaaaacagcacgcaaatgttctaaatgctcctctatagacttgctgtaaataaggatatcatcgaaataaacaacaacaaacaaacctatgaaggcccgtagaacttcgttcattaaacgcataaaggtgctgggagcattagtcaatccaaatggcataaccaaccattcatataaaccaaatttcgttttaaaagccgttttccattcatcaccgagtttcattctaatctgatggtaaccgctacgcaaatcaaccttagagaaaataacggcaccactaagctcatctagcatatcatcaaggcgtggaataggatatcgataacgaactgtgatgttattaatagcacgacaatctacgcacatacgccatgacccatctttctttggaacgagtaaaacgggaaccgagcaagggctaagagactcacgaatgtaacccttatcaagcagcgtctgcacctggcgctggatctccttcgtctcatctggatttgtacggtacggagcgcggttcggaagagaagtgccggggatgagatcgatctgatgctcaatgccacggaggggaggaagacccggtggtaagtccgtaggataaacatcagcatactcctgcaaaaggttaacaacagcagggggtatatccaaagacggtgcatcatcaagcggaacaagcattcgcgagcatacaagtgcataacagggcatatgagcttcatggagatcatcaaaatcagcacgtgtagcaagtaaaacaggagagtgcaacttgatttcagatttaataggtgcggctgatgtcgatttgacttgttgtgcagttttagcagccctagtaagatcatctttcaaaatttggtcaggggtcattggatgtataattattttctggcctttaaacatgaaagaataatgatttgaacgaccatgatgtaaactatcagtatcatattgccaaggtcgacccaataacaaagagcatgcttccataggaataacatcgcaatcaacataatcagaataagaacccagcgaaaaggggacacgtaccgaacgtgttacctttattttaccaccatcattaagccattgaatgtgatacggatgtggatgtgtgcgagtgggcaaggataatttctctaccaacgctgtacttgccaaattgttgcagctgccactatcgatgatgatgcgaatcgaccgttcgtgcacgacgcccttggtatggaatagagtgtgtcgctgatttttttcggcctgggcaacctgtgtgctgagaacacgctgcacaacaagactctcatacctatcagcgtcgatgggatcaacgtggacttcctcattttctgcatggttagtggcaatcatagcatgactagtttcctcagaatcactggctgaagagtactcaccattgtcacgtataagcaaggtacgcttgtttgggcagtcccgaatcatgtgcccaaaccctctgcaacgatggcactgaatatcccgtgtacgtcctgtggaagaagcggcgcctttggcagggggcgccactggcttggccggccctgtgcgcgatgtagtgctaggcgtaggaggtgcagggctggaaggagttgagctgtgtgttggaccccggcctgcaaaagagttagtatatgtctttgatcgtcgtccctgcacttcacgttcagctttgcaagcatattcaaacaatgtggttatatcaaaataatccttataatcaagtatatcctgaatttccctgttcaaaccaccacgaaaacgcgccatagcagcgtcatctgactcaaccaaaccacaacgaagcatacccttttgcaactcctggtaatattcctcaacagattgtgaaccttgttgaaaacgctgcattttgttaagcaaatcacgagcataataggaaggaacaaatctgtggcgcatggcagtttttaattgggtccaagtaatgacactgttaatgggaagtttttgtttatactcacgccaccaaattaaagcaaaatcagtaaattcactaatggcagccttcacttggctattagcaggaatatcatggcatgaaaatttctgttctacctctaattcccaatcaagatatgcagcaggatcatatttaccattaaaagatggaattttaaatttaatcttagaaaataagtcattagggggatgacgaaccacacgacgtgcacgaccacggcgatctccatcgtcctgctcagtgtcaccgccgtattcctgctccatctttgtggtcaatgcatcaaggcgtgccaggatggtgtcgagtgtggtgcgagtcgccgtttgagcaaggtcaagttggttgaaacgctcggtcgtcgaagtgatcgttgaatcaagccgttcatgcatcgtcctaatgtcagcagcaagtccatcaacttggccccttacttcctgcaactgggcatccaccatgtcgtgtgctcctgccatagttagcgcaaacaccaaaaggagaaaaaccaacgacaaaaacaggggtgtactgctcacaaggcgctcacactagtgctgttatcaagttcttatccgttcttaccaagccacagtggtgaactgcaaccaacaggtggaaccggtgaaagattggatgagcgattgcttggagaaacagaaacctgctcgtcgtagaaatatgtggagttgtgggtaggctgcactcaagtcaaggattagcacgatcaaacaataatgcaaagttgaattatagtgcaaaacacgaaactatattgctggccacaggtgcaaaggatggatggatggaaatagcagaatggcagtaacgtaaatattgtactagtgatgccaaaaaggcactagtacaaatcacaggtgattttgtttttcttttttgtatgatttttttgatatttttctcagcacaagaagcaacaagataggagctacacgaagtttcacctaaaacagatatcagatgtggtctacagaaaatcaggaagttctctgaaaagcgtgcgagaactttgacggatttttttctttattttcctgaatttttttgacaattttgtcgaaccccaaacagaccgtaggtgagtttggccgggctcagaatggtgtcaactagctcctgtaaaaatttcagattttttggacacccgagcgaaaagttatgcccggtttaaggaaggtacctcaaattatgttttcaaacgaccggaatgaaacaaccgtatcctttctccttcgttgttttttgtttctgtttttttttttacgtaaccgaaggagaaaaacaaggaaacgatgttgactcggtttgtttttttttctgtttttttttctgttttttttcgtaaccgaaggagaaaatcaaggaaaacagccgttgactcggtttgttttttctgtttttttttgacgtaaccgaaggagaaaaacaaggaaacaatgttgactcggtttgtggtgtgatcaaacgagagatggtggcggcgctagggtttgaatggtggaagaacacaatgcaaccagcaacaaatgacgcgaaagcacacaaattcaacaatgcagattattgaaagaaagtgcgaggctcaaaagggtgctgggataagatctaacctgaatttttatgtggttttgtggactgtaggaaaaaaaaacgctcgataaactcaccgatcaacctagaaatctgataccaattgatgaagctgaggtgcccgatctttcggcgagtagagataattccgatttggcggaagatgacccttgcgatccgactacgacgagcaagcccgaggcgccaatgcaatcgctgaaccaactccctgtggttaccgaccttgctgatgcgagatcggcctgatcacgaagatcgtttcctgtgcgcaatcgaagaacgaacaagaataagatgcgagcaatctaatctattactcgagggtggagttctgaatacacgaagacagcgcagattagcgcgtgttcgagagtagctaaggctaacgtaaaacaaaactcaggaaataaaggaggcgcagctcctgaataaatagagagggggcgcagcccctaggggcggccaaccctaggtcgtccattatgggccgcaattgggctggtcgtctattcttccgggccttcgttctttaacaacatgatgtagttcaattctcttgcacgggcccgagtcactggcccaggtggaaggggtggcgcctgggctggagaaggtgctgctggtgtagatgtgctcgtgttggtgttgatgtccgcatcaa

SEQ ID NO: 4 - DNA, 7572 bp, Zea mays
  source (1)...(7572): CRM2
tgatgaagacatccacactactgatgcatctataccaatacaagtaccaatttctggtcccattactcgcgctcgtgctcgtcaactcaaccatcaggtgattacactcttgagttcatgtccatcatatttagaccatggagacccgtgcactcttgttttgcttaggaatcagggagaagaccgaaagggaaaaggatttgaacatgctggattcggactgcagaagaacaccaacttgtgacggtcaccacggtcagatgcgggctcggattggaatgttcaagcacaacatggaaagcttatcaagtctactttcatatggatccggaattatagtcatatctgttctgaggccgccgtaatcattgttttcttaccgagacatttcctgccttttctgcccatggtgctgcgtcaccctattttggcccaatgggtcgtgtatcaagttaggtccattagggacgcatcctagggttgcagcacgaccccaatacccttgtggtcgtcctcccatgtttataaaccccctagccgccaccaagaacagcgggttttgtttagatcaagtttagctctcgctacttgcttgcaagcgcgcgtgctagttcagccgcccgtcttcttgtcttcggaaccccaccatattggagtttgatctttaaacctacatttagatctggtaattcagtacttgttctacttgttcttgctagttcttcgattgcttgcaggacgagtgccctagtggccagggtgtcacgctccacaagatcgtgacagccataggaggtggtgtatcggttgctaaggcgcagcgtctttggaaggctgtagtcgggccgtgaacgtcgtctcctcccccaatcgagttattccacaccctctcatcgaaagatcgggcaatcacccaacgggtgcacatcagttggtaatcagagcaaggtttatcggtgagagatttacttttcttcgctgttttcttatctcctatagtccagaaaaagccaaaaaaatagtagattagttttaccgcaatcctataaaccattgagcatttactagtactacttagttagggcttgttgagtttttggttgcatcggttgtgtcgagttgctggtcttagtttattcctttagagttttgagttctaccacgttttggtcaccacgagatccaccatcaccaaaaacatctctggttcgtttttgccaccacggatacatatcatatccgatttggaagtttaaatacaatctggaaagcttatcttatcttctttccaacggatctgaccttatctcaaaattcgttctgagcgctccgcaatcatcgtagagatttctggactttctatattaacaagatttgttaaatctgatttaaaggggttgttagcaatatctttattgtttgggttgtcatagtgaaaaaaagggtttaggcccctgcaaaaaaaaacagaagaagaagaaaaaaaaagaatagaaaagaaaaaaaaggaaaagaagaagaagggggctgaatctctaaatctgttgtttctctttgtgctgtgctagttgttctttttcagtgactacctttgtgcctaggctcacgtctctagcctggtttagcctaggaccagcacagtaccaccgttgaacgattattcagcttgcttttgtaactaacgtggtactagtgtattccttgcttcagcccacctacaactctacatatttcgactacagtttgacaggtcgtgttgctgcggcaccgatacacttattccacggttgcagacttgttggttgctgacccctcctgttgtgcaaggtaagaattggtaagagcttgtgtggcaggttgagagtgagcgccttgcagtagctacatcctaatagttgtagagtttttattccttcacatttttttttcttgttgcctctgttcgtctaaccatggcaggattggaggttgatgatgcttctcgtaatatgccacactctcctcgcaccaagggtatcatacaacactttgtaaggctggtgaaaacgcacacggaaggtcttgataatgacatgcaggtgacgaatgaaaagatggggcaattggaggccacacagatcgacacaaacaccaaacttgcaaatgtggaaatgacagttgctcatattgacaagagccttgtcgcactcttgaggcgatttgatgagatgcatgctaataccaatggtgggcgtgatgagggcgccgaaggtaactgggatgactatgttgctgatactgaacaagatgaccaagaagcacctaatcgccggcgactacgtactaaccgtagaggtatgggtggttttcaccgacgtgaggtacatggtaatgatgatgcttttagtaaggttaaatttaaaatacctccttttgatggtaaatatgaccctgatgcttacattacttgggagattgcggttgatcaaaagtttgcatgccatgaatttcctgagaatgcgcgggttagagctgctactagtgagtttactgaatttgcttctgtttggtggatagaacatggtaagaagaatcctaataacatgccacaaacttgggatgcgttgaaacgggtcatgcgggctagatttgttccttcttattatgcacgtgatatgttaaacaagttgcaacaattgagacagggtactaaaagtgtagaagaatattatcaggaattacaaatgggtatgctgcgttgtaacatagaggagggtgaggaatctgctatggctagatttttgggcgggttaaatagggaaattcaggacatccttgcttataaagattatgctaatgtaacccgattgtttcatcttgcttgcaaagctgaaagggaagtgcagggacgacgtgctagtgcaaggtctaatgtttctgcaggaaaatctacaccatggcaacagcgcacgactacgtccatgaccggccgtacactagcaccaactccctcgccaagtcgaccagcacccccgccttcctccagcgacaaaccacgtgcatcttccacaaattcagcaaccaaatctgcccagaaaccagcaggtagtgcctcttcagtagcctccacgggtagaacaagagatgttctgtgttatcgatgcaagggctatggacacgtgcagcgtgattgtcctaatcagcgtgttttggtggtaaaagacgatggtgggtattcctctgctagtgatttggatgaagctacacttgctttgcttgcggctgatgatgcaggcactaaggaaccacccgaagaacagattggtgcagatgatgcagagcattatgagagcctcattgtacagcgtgtgcttagtgcacaaatggagaaggcagagcagaatcagcgacatacgttgtttcaaacaaagtgtgtcattaaggagcgttcatgtcgtttgatcattgatggaggtagctgcaacaacttggctagcagcgacatggtggagaagcttgcacttacgaccaaaccgcacccgcatccatatcacattcaatggctcaacaatagtggtaaggtcaaggtaaccaagctggtacgaattaattttgctattggttcatatcgtgatgttgttgactgtgatgttgtgcctatggatgcttgtaatattctgctaggtagaccatggcaatttgattcagattgtatgcatcatggtagatcaaatcaatattctctcatacaccatgataagaaaattattttgcttcccatgtcccctgaggctattgtgcgtgatgatgttgctaaagctaccaaagctaaaactgagaacaacaagaatattaaagttgttggtaataacaaagatgggataaaattgaaaggacattgcttgcttgcaacaaaaactgatgttaatgaattatttgcttccactactgttgcctacgccttggtatgcaaggatgctttgatttcaattcaagatatgcagcattctttgcctcctgttattactaacattttgcaggagtattctgatgtatttccaagtgagataccagaggggctgccacctatacgagggattgagcaccaaattgatcttattcctggtgcatctttgccgaatcgtgcgccatataggacaaatccagaggaaacaaaagaaattcagcgacaagtgcaagaactactcgacaaaggttacgtgcgtgagtctcttagtccgtgtgctgttccggttattttagtgcctaaaaaagatggaacatggcgtatgtgtgttgattgtagggctattaataatatcacgatacgttatcgacaccctattccacgtttagatgatatgcttgatgaattgagtggtgccattgtcttttctaaagttgatttgcgtagtgggtaccaccagattcgtatgaaattgggagatgaatggaaaactgctttcaaaactaagttcggattgtatgagtggttagtcatgccttttgggttaactaatgcacctagcactttcatgagattaatgaacgaggttttgcgtgccttcattggaaaatttgtggtagtatactttgatgacatattaatctacagcaaatctatggatgaacatgttgatcacatgcgtgctgtttttaatgctttacgagatgcacgtttatttggtaaccttgagaagtgcacattttgcaccgatcgagtttcgtttcttggttatgttgtgactccacagggaattgaggttgatcaagccaaggtagaagcgatacatggatggcctatgccaaagactatcacacaggtgcggagtttcctaggacttgctggcttctatcgccgttttgtgaaggactttagcaccattgctgcacctttgaatgagcttacgaagaagggagtgcattttagttggggcaaagtacaagagcacgctttcaacgtgctgaaagataagttgacacatgcacctctcctccaacttcctgattttaataagacttttgagcttgaatgtgatgctagtggaattggattgggtggtgttttgttacaagaaggcaaacctgttgcatattttagtgaaaaattgagtgggtctgttctaaattattctacttatgataaggaattatatgctcttgtgcgaacattagaaacatggcagcattatttgtggcccaaagagtttgttattcattctgatcatgaatctttgaaacatattcgtagtcaaggaaaactgaaccgtagacatgctaagtgggttgaatttatcgaatcgtttccttatgttattaagcacaagaaaggaaaagagaatatcattgctgacgctttgtctaggagatatactttgctgaatcaacttgactacaaaatctttggattagagacgattaaagaccaatatgttcatgatgctgattttaaagatgtgttgctgcattgtaaagatgggaaaggatggaacaaatatatcgttagtgatgggtttgtgtttagagctaacaagctatgcattccagctagctccgttcgtttgttgttgttacaggaagcacatggaggtggcttaatgggacattttggagcaaagaaaacggaggacatacttgctggtcatttcttttggcccaagatgagaagagatgtggtgagattggttgctcgttgcacgacatgccaaaaggcgaagtcacggttaaatccacacggtttgtatttgcctctacccgttcctagtgctccttgggaagatatttctatggattttgtgctgggattgcctaggactaggaagggacgtgatagtgtgtttgtggttgttgatagattttctaagatggcacatttcataccatgtcataaaactgacgatgctactcatattgctgatttgttctttcgtgaaattgttcgcttgcatggtgtgcccaacacaatcgtttctgatcgtgatgctaaatttcttagtcatttttggaggactttgtgggcaaaattggggactaagcttttattttctactacatgtcatcctcaaactgatggtcaaactgaagttgtgaatagaactttgtctactatgttaagggcagttctaaagaagaatattaagatgtgggaggactgtttgcctcatattgaatttgcttataatcgatcattgcattctactacaaagatgtgcccatttcagattgtatatggtttgttacctcgtgctcctattgatttaatgcctttgccatcttctgaaaaactaaattttgatgctactaggcgtgctgaattgatgttaaaactgcacgaaactactaaagaaaacatagagcgtatgaatgctagatataagtttgctagtgataaaggtagaaaggaaataaattttgaacctggagatttagtttggttgcatttgagaaaggaaaggtttcctgaattacgaaaatctaaattgttgcctcgagccgatggaccgtttaaagtgctagagaaaattaacgacaatgcatataggctagatctgcctgcagactttggggttagccccacatttaacattgcagatttaaagccctacttgggagaggaagttgagcttgagtcgaggacgactcaaatgcaagaaggggagaatgatgaagacatccacactactgatgcatctataccaatacaagtaccaatttctggtcccattactcgcgctcgtgctcgtcaactcaaccatcaggtgattacactcttgagttcatgtccatcatatttagagccatggagacccgtgcactcttgttttgcttaggaatcagggagaagaccgaaagggaaaaggatttgaacatgctggattcggactgcagaagaacaccaacttgtgacggtcaccacggtcagatgcgggctcggattggaatgttcaagcacaacatggaaagcttatcaagtctactttcatatggatccggaattatagtcatatctgttctgaggccgccgtaatcattgttttcttaccgagacatttcctgccttttctgcccatggtgctgcgtcaccctattttggcccaatgggtcgtgtatcaagttaggtccattagggacgcatcctagggttgcagcacgaccccaatacccttgtggtcgtcctcccatgtttataaaccccctagccgccaccaagaacagcgggttttgtttagatcaagtttagctctcgctacttgcttgtaagcgcgcgtgctagttcagccgcccgtcttcttgtcttcggaaccccaccatattggagtttgattttgaaacctacatttagatctggtaattcagtacttgttctacttgttcttgctagttcttcgattgcttgcaggacgagtgccctagtggccagggtgtcacgctccacaagatcgtgacagccataggaggtggtgtatcggttgctaaggcgcagcgtctttggaaggctgtagtcgggccgtgaacgtcgtctcctcccccaatcgagttattccacaccctctcatcgaaagatcgggcaatcacccaacgggtgcacatcag

SEQ ID NO: 5 - DNA, 32 bp, Artificial Sequence
  Overgo telomere primer1
agggtttagggtttagggtttagggtttaggg

SEQ ID NO: 6 - DNA, 30 bp, Artificial Sequence
  Overgo telomere primer2
ccctaaaccctaaaccctaaaccctaaacc

SEQ ID NO: 7 - DNA, 24 bp, Artificial Sequence
  Primer CentC-OVG-1-40-F    Biocode 65644
ggttccggtggcaaaaactcgtgc

SEQ ID NO: 8 - DNA, 24 bp, Artificial Sequence
  Primer CentC-OVG-1-40-R      Biocode 65645
tgtcggtgcatacaaagcacgagt

SEQ ID NO: 9 - DNA, 24 bp, Artificial Sequence
  Primer CentC-OVG-51-90-F  Biocode 65646
gaatgggtgacgtgcgacaacgaa

SEQ ID NO: 10 - DNA, 24 bp, Artificial Sequence
  Primer CentC-OVG-51-90-R   Biocode 65647
ggtggtttctcgcaatttcgttgt

SEQ ID NO: 11 - DNA, 24 bp, Artificial Sequence
  Primer CentC-OVG-101-140-F   Biocode 65648
gttttggacctaaagtagtggatt

SEQ ID NO: 12 - DNA, 24 bp, Artificial Sequence
  Primer CentC-OVG-101-140-R Biocode 104790
cacaacgaacatgcccaatccact

SEQ ID NO: 13 - DNA, 24 bp, Artificial Sequence
  Primer CRM1-LTR-OVG1-F Biocode 69509
cttggtcttggacagtacctcact

SEQ ID NO: 14 - DNA, 24 bp, Artificial Sequence
  Primer CRM1-LTR-OVG2-F Biocode 69510
cccttgcgatccgactacgacgag

SEQ ID NO: 15 - DNA, 24 bp, Artificial Sequence
  Primer CRM1-LTR-OVG3-F Biocode 69511
tcacgaagatcgtttcctgtgcgc

SEQ ID NO: 16 - DNA, 24 bp, Artificial Sequence
  Primer CRM1-LTR-OVG4-F Biocode 69512
cagcgcagattagcgcgtgttcga

SEQ ID NO: 17 - DNA, 24 bp, Artificial Sequence
  Primer CRM1-LTR-OVG5-F Biocode 69513
ccaaccctaggtcgtccattatgg

SEQ ID NO: 18 - DNA, 24 bp, Artificial Sequence
  Primer CRM1-LTR-OVG6-F Biocode 69514
ttcaattctcttgcacgggcccga

SEQ ID NO: 19 - DNA, 24 bp, Artificial Sequence
  Primer CRM1-LTR-OVG1-R Biocode 69515
tcaggtctacttcatcagtgaggt

SEQ ID NO: 20 - DNA, 24 bp, Artificial Sequence
  Primer CRM1-LTR-OVG2-R Biocode 69516
tggcgcctcgggcttgctcgtcgt

SEQ ID NO: 21 - DNA, 24 bp, Artificial Sequence
  Primer CRM1-LTR-OVG3-R Biocode 69517
tgttcgttcttcgattgcgcacag

SEQ ID NO: 22 - DNA, 24 bp, Artificial Sequence
  Primer CRM1-LTR-OVG4-R Biocode 69518
ttagccttagctactctcgaacac

SEQ ID NO: 23 - DNA, 24 bp, Artificial Sequence
  Primer CRM1-LTR-OVG5-R Biocode 69519
ccagcccaattgcggcccataatg

SEQ ID NO: 24 - DNA, 24 bp, Artificial Sequence
  Primer CRM1-LTR-OVG6-R Biocode 69520
cacctgggccagtgactcgggccc

SEQ ID NO: 25 - DNA, 24 bp, Artificial Sequence
  Primer CRM2-LTR-OVG1-F Biocode 69521
tgatgaagacatccacactactga

SEQ ID NO: 26 - DNA, 24 bp, Artificial Sequence
  Primer CRM2-LTR-OVG2-F Biocode 69522
ttgaacatgctggattcggactgc

SEQ ID NO: 27 - DNA, 24 bp, Artificial Sequence
  Primer CRM2-LTR-OVG3-F Biocode 69523
ctgcccatggtgctgcgtcaccct

SEQ ID NO: 28 - DNA, 24 bp, Artificial Sequence
  Primer CRM2-LTR-OVG4-F Biocode 69524
gcgcgtgctagttcagccgcccgt

SEQ ID NO: 29 - DNA, 24 bp, Artificial Sequence
  Primer CRM2-LTR-OVG5-F Biocode 69525
gtatcggttgctaaggcgcagcgt

SEQ ID NO: 30 - DNA, 24 bp, Artificial Sequence
  Primer CRM2-LTR-OVG1-R Biocode 69526
tattggtatagatgcatcagtagt

SEQ ID NO: 31 - DNA, 24 bp, Artificial Sequence
  Primer CRM2-LTR-OVG2-R Biocode 69527
aagttggtgttcttctgcagtccg

SEQ ID NO: 32 - DNA, 25 bp, Artificial Sequence
  Primer CRM2-LTR-OVG3-R Biocode 69528
cccattgggccaaaatagggtgacg

SEQ ID NO: 33 - DNA, 24 bp, Artificial Sequence
  Primer CRM2-LTR-OVG4-R Biocode 69529
ttccgaagacaagaagacgggcgg

SEQ ID NO: 34 - DNA, 24 bp, Artificial Sequence
  Primer CRM2-LTR-OVG5-R Biocode 69530
ctacagccttccaaagacgctgcg

SEQ ID NO: 35 - DNA, 24 bp, Artificial Sequence
  Primer CentA-LTR-OVG1-F Biocode 69531
tgatgagaacataacccgcacaga

SEQ ID NO: 36 - DNA, 24 bp, Artificial Sequence
  Primer CentA-LTR-OVG2-F Biocode 69532
aggatgatgaggacatcactgcca

SEQ ID NO: 37 - DNA, 24 bp, Artificial Sequence
  Primer CentA-LTR-OVG3-F Biocode 69533
aaccatctagaatttgagaaggca

SEQ ID NO: 38 - DNA, 24 bp, Artificial Sequence
  Primer CentA-LTR-OVG4-F Biocode 69534
gtccagaaactgccgagtgaactc

SEQ ID NO: 39 - DNA, 24 bp, Artificial Sequence
  Primer CentA-LTR-OVG5-F Biocode 65535
gagagagtttcgttctccattaga

SEQ ID NO: 40 - DNA, 24 bp, Artificial Sequence
  Primer CentA-LTR-OVG6-F Biocode 69536
gttcttgcttgttctcgattgctt

SEQ ID NO: 41 - DNA, 24 bp, Artificial Sequence
  Primer CentA-LTR-OVG7-F Biocode 69537
ttggttgtggtagtcgggcagcca

SEQ ID NO: 42 - DNA, 24 bp, Artificial Sequence
  Primer CentA-LTR-OVG1-R Biocode 69538
cattaacatggtcatatctgtgcg

SEQ ID NO: 43 - DNA, 24 bp, Artificial Sequence
  Primer CentA-LTR-OVG2-R Biocode 69539
tggtgtggtgtattgatggcagtg

SEQ ID NO: 44 - DNA, 23 bp, Artificial Sequence
  Primer CentA-LTR-OVG3-R Biocode 69540
cttttattgccttgttgccttct

SEQ ID NO: 45 - DNA, 24 bp, Artificial Sequence
  Primer CentA-LTR-OVG4-R Biocode 69541
gacttgggtagagcaggagttcac

SEQ ID NO: 46 - DNA, 24 bp, Artificial Sequence
  Primer CentA-LTR-OVG5-R Biocode 69542
aggaatagaaaggagttctaatgg

SEQ ID NO: 47 - DNA, 24 bp, Artificial Sequence
  Primer CentA-LTR-OVG6-R Biocode 69543
acagccttgaacctgcaagcaatc

SEQ ID NO: 48 - DNA, 24 bp, Artificial Sequence
  Primer CentA-LTR-OVG7-R Biocode 69544
tgttggagaacgacgttggctgcc

SEQ ID NO: 49 - DNA, 24 bp, Artificial Sequence
  Primer Cent4-250-OVG1-F Biocode 69555
taagtgcaaaccattgttaaattt

SEQ ID NO: 50 - DNA, 24 bp, Artificial Sequence
  Primer Cent4-250-OVG2-F Biocode 69556
cacaaacccttaactcgaaactat

SEQ ID NO: 51 - DNA, 24 bp, Artificial Sequence
  Primer Cent4-250-OVG3-F Biocode 69557
atcgaaagataactcatatggctt

SEQ ID NO: 52 - DNA, 24 bp, Artificial Sequence
  Primer Cent4-250-OVG4-F Biocode 69558
tccactaaagaaccaagattgtga

SEQ ID NO: 53 - DNA, 24 bp, Artificial Sequence
  Primer Cent4-250-OVG1-R Biocode 69559
aattgtactatctctaaaatttaa

SEQ ID NO: 54 - DNA, 24 bp, Artificial Sequence
  Primer Cent4-250-OVG2-R Biocode 69560
tttagggtttggggttatagtttc

SEQ ID NO: 55 - DNA, 24 bp, Artificial Sequence
  Primer Cent4-250-OVG3-R Biocode 69561
gaccataatggtcaaaaagccata

SEQ ID NO: 56 - DNA, 24 bp, Artificial Sequence
  Primer Cent4-250-OVG4-R Biocode 69562
atatgttggacacaaatcacaatc

SEQ ID NO: 57 - DNA, 24 bp, Artificial Sequence
  Primer 18-26SrDNANTS-OVG1-F Biocode 69634
ccggaaataagcaaagtccaagcg

SEQ ID NO: 58 - DNA, 24 bp, Artificial Sequence
  Primer 18-26SrDNANTS-OVG2-F Biocode 69635
tatgtcttgggtgaagggcatggc

SEQ ID NO: 59 - DNA, 24 bp, Artificial Sequence
  Primer 18-26SrDNANTS-OVG3-F Biocode 69636
cgcaaggcgacgggcggcatggct

SEQ ID NO: 60 - DNA, 24 bp, Artificial Sequence
  Primer 18-26SrDNANTS-OVG4-F Biocode 69637
cgaggggttccccatggcgcacgg

SEQ ID NO: 61 - DNA, 24 bp, Artificial Sequence
  Primer 18-26SrDNANTS-OVG1-R Biocode 69638
tcggtgtctttccacacgcttgga

SEQ ID NO: 62 - DNA, 24 bp, Artificial Sequence
  Primer 18-26SrDNANTS-OVG2-R Biocode 69639
gttttccctccgttccgccatgcc

SEQ ID NO: 63 - DNA, 24 bp, Artificial Sequence
  Primer 18-26SrDNANTS-OVG3-R Biocode 69640
agacgcaaggccgaacagccatgc

SEQ ID NO: 64 - DNA, 24 bp, Artificial Sequence
  Primer 18-26SrDNANTS-OVG4-R Biocode 69641
ggcctcagttttcggcccgtgcgc

SEQ ID NO: 65 - DNA, 24 bp, Artificial Sequence
  Primer Subtelomere-266 Biocode 74794
gacacatgtttttgtcgtcgaaca

SEQ ID NO: 66 - DNA, 24 bp, Artificial Sequence
  Primer Subtelomere-266 Biocode 74795
ggaggcacgaaatcgctgttcgac

SEQ ID NO: 67 - DNA, 24 bp, Artificial Sequence
  Primer Subtelomere-266 Biocode 74796
cgaccgccacccatgatttgacca

SEQ ID NO: 68 - DNA, 24 bp, Artificial Sequence
  Primer Subtelomere-266 Biocode 74797
accttaccagtctctatggtcaaa

SEQ ID NO: 69 - DNA, 24 bp, Artificial Sequence
  Primer Subtelomere-266 Biocode 74799
tcccgtgagctatagcacacgttt

SEQ ID NO: 70 - DNA, 24 bp, Artificial Sequence
  Primer Subtelomere-266 Biocode 74800
acacgttttcatggccgagcgacc

SEQ ID NO: 71 - DNA, 24 bp, Artificial Sequence
  Primer Subtelomere-266 Biocode 74801
ccgtgttcctccacacgtgttttt

SEQ ID NO: 72 - DNA, 24 bp, Artificial Sequence
  Primer Subtelomere-266 Biocode 74802
aaggtgctccggggacaaaaacac

SEQ ID NO: 73 - DNA, 24 bp, Artificial Sequence
  Primer Subtelomere-266 Biocode 74803
ttggcctcccgcgagctatatcac

SEQ ID NO: 74 - DNA, 24 bp, Artificial Sequence
  Primer Subtelomere-266 Biocode 74803
ttggccacggaaatgtgtgatata

SEQ ID NO: 75 - DNA, 24 bp, Artificial Sequence
  Primer Subtelomere-266 Biocode 74805
ttatgtatccgacctgccaccttc

SEQ ID NO: 76 - DNA, 24 bp, Artificial Sequence
  Primer Subtelomere-266 BIocode 74806
ctccccggtctaaaacgaaggtgg

SEQ ID NO: 77 - DNA, 24 bp, Artificial Sequence
  Primer Subtelomere-266 Biocode 74807
gccacccgtgagctatagcacacg

SEQ ID NO: 78 - DNA, 24 bp, Artificial Sequence
  Primer Subtelomere-266 Biocode 74808
taggtttccataaaatcgtgtgct

SEQ ID NO: 79 - DNA, 24 bp, Artificial Sequence
  Primer 180-knob-OVG-21-60-F Biocode 65650
tgtcgaaaatagccatgaacgacc

SEQ ID NO: 80 - DNA, 24 bp, Artificial Sequence
  Primer 180-knob-OVG-21-60-R Biocode 65651
cggtattattggaaatggtcgttc

SEQ ID NO: 81 - DNA, 24 bp, Artificial Sequence
  Primer 180-knob-OVG-71-110-F Biocode 65652
cctacggatttttgaccaagaaat

SEQ ID NO: 82 - DNA, 24 bp, Artificial Sequence
  Primer 180-knob-OVG-71-110-R Biocode 65653
atttctagtggagaccatttcttg

SEQ ID NO: 83 - DNA, 24 bp, Artificial Sequence
  Primer 180-knob-OVG-141-180-F Biocode 65654
atgtggggtgaggtgtatgagcct

SEQ ID NO: 84 - DNA, 24 bp, Artificial Sequence
  Primer 180-knob-OVG-141-180-R Biocode 65655
atgagcctctggtcgatgatcaat

SEQ ID NO: 85 - DNA, 24 bp, Artificial Sequence
  Primer 5S-rDNA-OVG-1-40-F Biocode 65656
ggatgcgatcataccagcactaaa

SEQ ID NO: 86 - DNA, 24 bp, Artificial Sequence
  Primer 5S-rDNA-OVG-1-40-R Biocode 65657
tgatgggatccggtgctttagtgc

SEQ ID NO: 87 - DNA, 24 bp, Artificial Sequence
  Primer 5S-rDNA-OVG-61-100-F Biocode 65658
cttgggcgagagtagtactaggat

SEQ ID NO: 88 - DNA, 24 bp, Artificial Sequence
  Primer 5S-rDNA-OVG-61-100-R Biocode 65659
tcccaggaggtcacccatcctagt

SEQ ID NO: 89 - DNA, 24 bp, Artificial Sequence
  Primer 5S-rDNA-OVG-161-200-F Biocode 65660
accatagtaaaaatgggtgaccgt

SEQ ID NO: 90 - DNA, 23 bp, Artificial Sequence
  Primer 5S-rDNA-OVG-161-200-R Biocode 65661
taatttaacacgagaacggtcac

SEQ ID NO: 91 - DNA, 24 bp, Artificial Sequence
  Primer 5S-rDNA-OVG-261-230-F Biocode 65662
ccgtgggcgagccgagcacggagg

SEQ ID NO: 92 - DNA, 24 bp, Artificial Sequence
  Primer 5S-rDNA-OVG-261-230-R Biocode 65663
tcctcttatgcccacacctccgtg

SEQ ID NO: 93 - DNA, 24 bp, Artificial Sequence
  Primer 350-knob-OVG-31-70-F Biocode 65664
ctcaaatgacgtttctatgatatt

SEQ ID NO: 94 - DNA, 24 bp, Artificial Sequence
  Primer 350-knob-OVG-31-70-R Biocode 65665
tgaatacaatgccctcaatatcat

SEQ ID NO: 95 - DNA, 24 bp, Artificial Sequence
  Primer 350-knob-OVG-121-160-F Biocode 65666
ctaggtttcctataatcccctcta

SEQ ID NO: 96 - DNA, 23 bp, Artificial Sequence
  Primer 350-knob-OVG-121-160-R Biocode 65667
ctaggtatgccttgaatagaggg

SEQ ID NO: 97 - DNA, 24 bp, Artificial Sequence
  Primer 350-knob-OVG-161-200-F Biocode 65668
atgttgtttatgtccactcaagta

SEQ ID NO: 98 - DNA, 24 bp, Artificial Sequence
  Primer 350-knob-OVG-161-200-R  Biocode 65669
atggtgtacggtgttttacttgag

SEQ ID NO: 99 - DNA, 24 bp, Artificial Sequence
  Primer 350-knob-OVG-261-300-F  Biocode 65670
gtgagatctgtccaaacataggtt

SEQ ID NO: 100 - DNA, 24 bp, Artificial Sequence
  Primer 350-knob-OVG-261-300-R Biocode 65671
ggtgccttacaaccgtaacctatg

SEQ ID NO: 101 - DNA, 40 bp, Artificial Sequence
  Primer to b010.m7 fis31
gcaaactttatgtgatcccttcctcgctgaacgagatgag

SEQ ID NO: 102 - DNA, 40 bp, Artificial Sequence
  Primer to b108.h15 fis47
gggacggcaagtcacggtaagaccagtccaaccgaatgat

SEQ ID NO: 103 - DNA, 40 bp, Artificial Sequence
  Primer to Cen3n.pk0001.g11
ccaaacttgctgagattactgggcaatctgttcgctcgca

SEQ ID NO: 104 - DNA, 24 bp, Artificial Sequence
  Overgo probe primer 23715-3101-3200f  Biocode 103022
ccaggtagtttgaaacagtattct

SEQ ID NO: 105 - DNA, 24 bp, Artificial Sequence
  Overgo probe primer 23715-3501-3600f  Biocode 103023
ataaaggaaaagggcaaaccaaac

SEQ ID NO: 106 - DNA, 24 bp, Artificial Sequence
  Overgo probe primer 23715-1401-1500f  Biocode 103024
gatgcccacattatagtgattagc

SEQ ID NO: 107 - DNA, 24 bp, Artificial Sequence
  Overgo probe primer 23715-2901-3000f  Biocode 103025
ccacatatagctgctgcatatgcc

SEQ ID NO: 108 - DNA, 24 bp, Artificial Sequence
  Overgo probe primer 23715-3701-3800f  Biocode 103026
cggatctaacacaaacatgaacag

SEQ ID NO: 109 - DNA, 24 bp, Artificial Sequence
  Overgo probe primer23715-1-100f  Biocode 103027
cgatgaattttctcgggtgttctc

SEQ ID NO: 110 - DNA, 24 bp, Artificial Sequence
  Overgo probe primer 23715-101-200f Biocode 103028
cctgcagccctaataattcagaag

SEQ ID NO: 111 - DNA, 24 bp, Artificial Sequence
  Overgo probe primer 23715-301-400f  Biocode 103029
cacagtcgatgaatccagaaaagc

SEQ ID NO: 112 - DNA, 24 bp, Artificial Sequence
  Overgo probe primer 23715-901-1000f  Biocode 103030
gcgtgcaatccatcttgttcaatc

SEQ ID NO: 113 - DNA, 24 bp, Artificial Sequence
  Overgo probe primer 23715-3201-3300f  Biocode 103031
caaccacaccacatcatcacaacc

SEQ ID NO: 114 - DNA, 24 bp, Artificial Sequence
  Overgo probe primer 23715-3601-3700f  Biocode 103032
actggcaagttagcaatcagaacg

SEQ ID NO: 115 - DNA, 24 bp, Artificial Sequence
  Overgo probe primer 23715-4901-5000f   Biocode 103033
catgaacgtgtcttcaactagagg

SEQ ID NO: 116 - DNA, 24 bp, Artificial Sequence
  Overgo probe primer 23715-4201-4300f   Biocode 103034
gacggcgtttaacaggctggcatt

SEQ ID NO: 117 - DNA, 24 bp, Artificial Sequence
  Overgo probe primer 23715-201-300f  Biocode 103035
ccaagctcttcagcaatatcacgg

SEQ ID NO: 118 - DNA, 24 bp, Artificial Sequence
  Overgo probe primer 23715-601-700f  Biocode 103036
atactttctcggcaggagcaaggt

SEQ ID NO: 119 - DNA, 24 bp, Artificial Sequence
  Overgo probe primer 23715-1001-1100f  Biocode 103037
atccttggcggcaagaaagccatc

SEQ ID NO: 120 - DNA, 24 bp, Artificial Sequence
  Overgo probe primer 23715-1101-1200f  Biocode 103038
gcaagctacctgctttctctttgc

SEQ ID NO: 121 - DNA, 24 bp, Artificial Sequence
  Overgo probe primer 23715-1601-1700f   Biocode 103039
gcttcttggccatgtagatggact

SEQ ID NO: 122 - DNA, 24 bp, Artificial Sequence
  Overgo probe primer 23715-1801-1900f  Biocode 103040
ttcacgccgatgaacttcaccttg

SEQ ID NO: 123 - DNA, 24 bp, Artificial Sequence
  Overgo probe primer 23715-5001-5087f   Biocode 103041
aagcttgccaacgactacgcacta

SEQ ID NO: 124 - DNA, 24 bp, Artificial Sequence
  Overgo probe primer 23715-401-500f  Biocode 103042
ccctgatgctcttcgtccagatca

SEQ ID NO: 125 - DNA, 24 bp, Artificial Sequence
  Overgo probe primer23715-801-900f  Biocode 103043
agagcagccgattgtctgttgtgc

SEQ ID NO: 126 - DNA, 24 bp, Artificial Sequence
  Overgo probe primer 23715-1301-1400f   Biocode 103044
caggatcccgtaactataacggtc

SEQ ID NO: 127 - DNA, 24 bp, Artificial Sequence
  Overgo probe primer 23715-2801-2900f   Biocode 103045
cgacctgcagaagtaacaccaaac

SEQ ID NO: 128 - DNA, 24 bp, Artificial Sequence
  Overgo probe primer 23715-3401-3500f   Biocode 103046
atctagaacgaccgcccaaccaga

SEQ ID NO: 129 - DNA, 24 bp, Artificial Sequence
  Overgo probe primer 23715-3801-3900f  Biocode 103047
atttgggggagatctggttgtgtg

SEQ ID NO: 130 - DNA, 24 bp, Artificial Sequence
  Overgo probe primer 23715-3901-4000f   Biocode 103048
gagggggtgtctatttattacggc

SEQ ID NO: 131 - DNA, 24 bp, Artificial Sequence
  Overgo probe primer 23715-4801-4900f   Biocode 103049
catgcaagctgatctgagcttggc

SEQ ID NO: 132 - DNA, 24 bp, Artificial Sequence
  Overgo probe primer 23715-2101-2200f   Biocode 103050
tccatgcgcaccttgaagcgcatg

SEQ ID NO: 133 - DNA, 24 bp, Artificial Sequence
  Overgo probe primer 23715-501-600f  Biocode 103051
ttccatccgagtacgtgctcgctc

SEQ ID NO: 134 - DNA, 24 bp, Artificial Sequence
  Overgo probe primer 23715-1201-1300f  Biocode 103052
atccactagtaacggccgccagtg

SEQ ID NO: 135 - DNA, 24 bp, Artificial Sequence
  Overgo probe primer 23715-4001-4100f   Biocode 103053
gccacgcaatttctggatgccgac

SEQ ID NO: 136 - DNA, 24 bp, Artificial Sequence
  Overgo probe primer 23715-701-800f   Biocode 103054
cgatagccgcgctgcctcgtcttg

SEQ ID NO: 137 - DNA, 24 bp, Artificial Sequence
  Overgo probe primer 23715-1901-2000f   Biocode 103055
cacttgaagccctcggggaaggac

SEQ ID NO: 138 - DNA, 24 bp, Artificial Sequence
  Overgo probe primer 23715-1701-1800f   Biocode 103056
tccttcagcttcagggccttgtgg

SEQ ID NO: 139 - DNA, 24 bp, Artificial Sequence
  Overgo probe primer 23715-2001-2100f   Biocode 103057
caccttggagccgtactggaactg

SEQ ID NO: 140 - DNA, 24 bp, Artificial Sequence
  Overgo probe primer 23715-2601-2700f  Biocode 103058
tgcggctcggtgcggaagttcacg

SEQ ID NO: 141 - DNA, 24 bp, Artificial Sequence
  Overgo probe primer 23715-4101-4200f  Biocode 103059
acgcgacgctgctggttcgctggt

SEQ ID NO: 142 - DNA, 24 bp, Artificial Sequence
  Overgo probe primer 23715-3101-3200r   Biocode 103060
cgttctagatcggagtagaatact

SEQ ID NO: 143 - DNA, 24 bp, Artificial Sequence
  Overgo probe primer 23715-3501-3600r  Biocode 103061
tgtttcgttgcatagggtttggtt

SEQ ID NO: 144 - DNA, 24 bp, Artificial Sequence
  Overgo probe primer 23715-1401-1500r   Biocode 33332
gcacacatagtgacatgctaatca

SEQ ID NO: 145 - DNA, 24 bp, Artificial Sequence
  Overgo probe primer 23715-2901-3000r  Biocode 103062
gatatacttggatgatggcatatg

SEQ ID NO: 146 - DNA, 24 bp, Artificial Sequence
  Overgo probe primer 23715-3701-3800r  Biocode 103063
cccggtagttctacttctgttcat

SEQ ID NO: 147 - DNA, 24 bp, Artificial Sequence
  Overgo probe primer 23715-1-100r  Biocode 103064
attcgagccaatatgcgagaacac

SEQ ID NO: 148 - DNA, 24 bp, Artificial Sequence
  Overgo probe primer 23715-101-200r  Biocode 103065
gccttcttgacgagttcttctgaa

SEQ ID NO: 149 - DNA, 24 bp, Artificial Sequence
  Overgo probe primer 23715-301-400r  Biocode 103066
atggtggaaaatggccgcttttct

SEQ ID NO: 150 - DNA, 24 bp, Artificial Sequence
  Overgo probe primer 23715-901-1000r  Biocode 103067
gaggatcgtttcgcatgattgaac

SEQ ID NO: 151 - DNA, 24 bp, Artificial Sequence
  Overgo probe primer 23715-3201-3300r  Biocode 103068
tgctttttgttcgcttggttgtga

SEQ ID NO: 152 - DNA, 24 bp, Artificial Sequence
  Overgo probe primer 23715-3601-3700r  Biocode 103069
acctgtacgtcagacacgttctga

SEQ ID NO: 153 - DNA, 24 bp, Artificial Sequence
  Overgo probe primer 23715-4901-5000r   Biocode 103070
aattaagtcaggcgcgcctctagt

SEQ ID NO: 154 - DNA, 24 bp, Artificial Sequence
  Overgo probe primer 23715-4201-4300r   Biocode 103071
cttgtttcgagtagataatgccag

SEQ ID NO: 155 - DNA, 24 bp, Artificial Sequence
  Overgo probe primer 23715-201-300r  Biocode 103072
acatagcgttggctacccgtgata

SEQ ID NO: 156 - DNA, 24 bp, Artificial Sequence
  Overgo probe primer 23715-601-700r  Biocode 103073
gatctcctgtcatctcaccttgct

SEQ ID NO: 157 - DNA, 24 bp, Artificial Sequence
  Overgo probe primer 23715-1001-1100r   Biocode 103074
cctgcaaagtaaactggatggctt

SEQ ID NO: 158 - DNA, 24 bp, Artificial Sequence
  Overgo probe primer 23715-1101-1200r   Biocode 103075
aagggaaaacgcaagcgcaaagag

SEQ ID NO: 159 - DNA, 24 bp, Artificial Sequence
  Overgo probe primer 23715-1601-1700r   Biocode 103076
tacctggtggagttcaagtccatc

SEQ ID NO: 160 - DNA, 24 bp, Artificial Sequence
  Overgo probe primer 23715-1801-1900r   Biocode 103077
acggctgcttcatctacaaggtga

SEQ ID NO: 161 - DNA, 24 bp, Artificial Sequence
  Overgo probe primer 23715-5001-5087r   Biocode 103078
tgaagctcttgttggctagtgcgt

SEQ ID NO: 162 - DNA, 24 bp, Artificial Sequence
  Overgo probe primer 23715-401-500r  Biocode 103079
gtcttgtcgatcaggatgatctgg

SEQ ID NO: 163 - DNA, 24 bp, Artificial Sequence
  Overgo probe primer 23715-801-900r    Biocode 103080
attcggctatgactgggcacaaca

SEQ ID NO: 164 - DNA, 24 bp, Artificial Sequence
  Overgo probe primer 23715-1301-1400r  Biocode 103081
cgcttcgctaccttaggaccgtta

SEQ ID NO: 165 - DNA, 24 bp, Artificial Sequence
  Overgo probe primer 23715-2801-2900r  Biocode 103082
cgatgctcaccctgttgtttggtg

SEQ ID NO: 166 - DNA, 24 bp, Artificial Sequence
  Overgo probe primer 23715-3401-3500r Biocode 88245
ggttgtgatgatgtggtctggttg

SEQ ID NO: 167 - DNA, 24 bp, Artificial Sequence
  Overgo probe primer 23715-3801-3900r   Biocode 103083
gttcggagcgcacacacacacaac

SEQ ID NO: 168 - DNA, 24 bp, Artificial Sequence
  Overgo probe primer 23715-3901-4000r   Biocode 103084
tttcccttcctcgcccgccgtaat

SEQ ID NO: 169 - DNA, 24 bp, Artificial Sequence
  Overgo probe primer 23715-4801-4900r  Biocode 103085
taaaacgacggccagtgccaagct

SEQ ID NO: 170 - DNA, 24 bp, Artificial Sequence
  Overgo probe primer 23715-2101-2200r  Biocode 103086
acgtcatcaccgagttcatgcgct

SEQ ID NO: 171 - DNA, 24 bp, Artificial Sequence
  Overgo probe primer 23715-501-600r   Biocode 103087
agcgaaacatcgcatcgagcgagc

SEQ ID NO: 172 - DNA, 24 bp, Artificial Sequence
  Overgo probe primer 23715-1201-1300r   Biocode 103088
aagccgaattccagcacactggcg

SEQ ID NO: 173 - DNA, 24 bp, Artificial Sequence
  Overgo probe primer 23715-4001-4100r   Biocode 103089
ttggacttgctccgctgtcggcat

SEQ ID NO: 174 - DNA, 24 bp, Artificial Sequence
  Overgo probe primer 23715-701-800r  Biocode 103090
tgccctgaatgaactgcaagacga

SEQ ID NO: 175 - DNA, 24 bp, Artificial Sequence
  Overgo probe primer 23715-1901-2000r   Biocode 103091
ccgactacaagaagctgtccttcc

SEQ ID NO: 176 - DNA, 24 bp, Artificial Sequence
  Overgo probe primer 23715-1701-1800r  Biocode 103092
tgctgaagggcgagacccacaagg

SEQ ID NO: 177 - DNA, 24 bp, Artificial Sequence
  Overgo probe primer 23715-2001-2100r   Biocode 103093
ggacatcctgtccccccagttcca

SEQ ID NO: 178 - DNA, 24 bp, Artificial Sequence
  Overgo probe primer 23715-2601-2700r   Biocode 103094
acatcgagacctccaccgtgaact

SEQ ID NO: 179 - DNA, 24 bp, Artificial Sequence
  Overgo probe primer 23715-4101-4200r  Biocode 103095
agtctaacggacaccaaccagcga

SEQ ID NO: 180 - DNA, 24 bp, Artificial Sequence
  PCR primer for bacm.pk108.h15.f unique sequence
gatcgtcgaatgggaatccatggg

SEQ ID NO: 181 - DNA, 28 bp, Artificial Sequence
  PCR primer for bacm.pk108.h15.r unique sequence
ccctgagtgaaccatttaggaagatcag

SEQ ID NO: 182 - DNA, 24 bp, Artificial Sequence
  PCR primer for bacm.pk108.h15-2 FIS47.f unique sequence
tgcaacatccaaagacccaacatg

SEQ ID NO: 183 - DNA, 22 bp, Artificial Sequence
  PCR primer for bacm.pk108.h15-2 FIS47.r unique sequence
ttccaacatggttggtggtcag

SEQ ID NO: 184 - DNA, 26 bp, Artificial Sequence
  PCR primer for bacm.pk010.m07.fis31.f unique sequence
tgtcatgacatcttgttgctaccctg

SEQ ID NO: 185 - DNA, 22 bp, Artificial Sequence
  PCR primer for bacm.pk010.m07.fis31.r unique sequence
aaacccggagtttctatgcagg

SEQ ID NO: 186 - DNA, 591 bp, Zea mays
  misc_feature (1)...(591): n = A,T,C or G
  source (1)...(591): bacm.pk108.h15 unique sequence
ttgctcgtaacagatggttcangnnngattgatcgtcgaatgggaatccatgggcacccacttgaaattcaggttttctttttgctacacctagttatattttctgtttcatacgggtcttttttcccaagttgattttttgtgattgtttttgaggcaccttttaaaagaataaaatacacaaacattcttcaaattgtctgggaatgtcatctaggttcccaaacgattagtttggattcaaaacatccctgatcttcctaaatggttcactcagggttcgatccttcaaaatcagctagtccacgaccatcctacttggcagcccctacatctctttctcccccctctcgttcacaccttgttaatgtccatcagcatagagtcttgttagtgtccacgtcgccagccaaaggatttaccatggggtttgcaccttgagtgaaccacataacaagttgagggacatgaaattgcaaattaatagctcagggatctcgataacatgcttggacaagttttagcnactgctgatgcatcttagtcctattaaaagnntnnnnnacagtgcnacgncccctattttacacg

SEQ ID NO: 187 - DNA, 2000 bp, Zea mays
  source (1)...(2000): bacm.pk108.h15-2.fis47 unique sequence
tgagaggctgatatgtcttcttttttttcttattttttctaaaatcctgattcctttcaatgtcagttttgaattccaaattcaaatttaatttgattctcaagcttcaattttaatgcaacatccaaagacccaacatgaaatgcataattccattttatttatcttattttatctattaaacaaagagtttcttaatatgaaacttatatacacaaaagacactattctaagaaaacaattcctcatatatcatcttaaatcttttgctgaatattctttaaacattaattctaaatagttttatttgtacaagaatttgtgattatttcctacgaagagatggttcctaggcactataatgaatagttttgctaattaaacaattgaaaatgtttctatgttctctgttttaaccttagtttagagtttttaacttcaagtttgaactaccaaagtttgaacctctttttttattttctttatacttttaaaatacatttaaactcaaatcttttggagaacctttataaatcccaaaatagggttttgaggtgttataaacgaggagtctgtgcatgggacggcaagtcacggtaagaccagtccaaccgaatgatggggcagctcggtgtcgtctcaattaatgcatctcttaagttgctgaccaccaaccatgttggaacctgatcagttggtacccattgtctgtttacatgtggtagcttctaattggttcgcgtgatcttgaattttaaaaaattgaaataacatttttataaaattagaatctagcttgtggtaacattgctcactccattgttgaatatatcaaaatggagaaagcacgacgttaaaatgcttgcaacatttatgtaggagtgttattttatgtttttgcgaggagtataatcgtagtgtcactgttgacaatctttggcgacttttagctaaaggagaggagagacaatttcttgctaatgataggaattatagattgcatatattgaaagtgatagagctagagtgcccgatctttcggtgagtggagataattccgatttggtggaagtagaccctcacgatccgactacgacgagcgaacccgaagcgccaatgcaatcgctgaaccaactcccaatggttaccgaccttgcttatgcgagatcggcctgatcacgaagatcgtttcctgtgcgcaatcgaagaacgaacaagaaaaagatgcgagcaatcttaatatcactcgaggtggagttctgaatcacagaggacaacacgtatttgtgtgtgttctggggtagctaaagctagatgtaaaacaaaactcaagttctaaatgaaacaggactctgactaaatagaggagaggcgtgaacagtaggtcgacgctacagtaccacgtttactgttcacgacttacctaggcgccccatccgggccttcctattggaccatcttctaatcttctgggccttcgttctttaacaacatgatgtagttcaattctcttgcacgagcctgagtcactggcccaagtggaagggtggcgcctggactagggaagatggtgcctgggctggagaaggtgctgctggtgtagatgtactcatgttggtgttgatgtcctcctcatcctccccttcttgaactgaagtcgtcctcgacggcaactcctcatcttctcccgcatacggtttcaaatctgcaacattaaaattagtggaaacaccaaacttcgcaggtaggtcaaggatataagcattagcattaatcttggttagtatcttaaaaggaccagcaacacgaggcatcaatttagaacggcgcaaagtaggaaaacgatcctttctcaaatgcaacccaaccatatcaccaggttcaaaagtaactaggtttctgggctttactaccaataatctgatatttagcattagcagcaacaatgttttgttgagtttgttctggaggttatcatttgttcacatgtgcacatcatc

SEQ ID NO: 188 - DNA, 1541 bp, Zea mays
  source (1)...(1541): bacm.pk010.m07-fis31 unique sequence
atcgatacccttaattgggagataactgttatattaatagtgaaaaatccatcctattataatttttgttatatcttttacatggccatcagtaatcacagttaagagttggacaaaggcactatggagcgtggcccttctaattgtgttgctgaagttcttattaaggtttgccaattttttggtaggtgttccaaagcacagaaggctcttgagctaagccaacttttaggagtcaacatttcttcaacacaggtacttctgaagtagtcatgagtcattgcttatctgaagtaaggagagaaagttattgcttttcttttctgatgcgtgaggttgtgcatgtacattctatagagtgtgcctttcaagtactacatcaataatttcttatttcttcatagacctgtagcacctgaatgaaacctatttttgaactctgcattttttgaagatgacattatgtatcaatttagttctgtattggttgttgccaaaaaatttgtaagatattgagatagataatatatgtgatatttttttatgtagttgttttgcaataacattttgatgaatatttttgtatattattgtaacacataggcacctaactagtgtatatataggatggaaacacaaacaccatcgacgtcgatgatctcttggataccattatctagtgtaggtgtacatgggtattatgattatcatagtgtgtttatggttgtcatgacatcttgttgctaccctgacaggtaacctaaaaatccaaaacacaatgcaagtgcaggaatgtatgaccaatgcaaaagctaaagtaaagtgctttcacattcgttgccaatgaaagtttgaaaatgcttgaccagattttatcaactaataaatactgtatataataggtctaaatttgtgataacaaaacaagaaaaatagaaaagtggggaaacaaaaaatagtagaaagaggcgtggggagaggcgcgagagaggtggttggttgggggtggaggaccgtcggccttccccgtttcgtcttccggtcctcgttttatcccctcgcccttgcactcctccgccgcacccctttcctccttccgccctccgccgcgcctggctttctcccttcccgagaggccacgctccatccccgcccgcgctgcctcccctggcgatcggcggcgaccgcggcccaacgaaagcgtcgtggtcggccggtaagagttccttgctttcctctacgcgttgctcctgccgttacgcaaactttatgtgatcccttcctcgctgaacgagatgagaagaaaagttgctgactttcgttcacacgtgcacctgcatagaaactccgggttttggcttccgttggaaaattttgataaatgacttgccacgcttcgtcttacttcaaattcgttcaaattaattacttgctatgcttcatcttacttcaaattcgttcgattcttgctgggttcctctgattatatctttttttgtatgatcaagcgtaaagataccgtcgacctcccgctttttgaa

SEQ ID NO: 189 - DNA, 355 bp, Artificial Sequence
  TELO-266 consensus 355 bp repeat
attttagtgtcgaaaccatggtaaaatgaaatttgagtctcccaaccatatcaactttgctgacatagtagaattttagtgtccaaaccatagtacacattttggtccccggaggccggtaaggctatttttggcctcccgtvacacatgttttcatcgtcaaacaacgatttcatgcctcccgtccgccacccatgatttggccacwgagactgctaaggctrtttatggcctcccgtaagctatagcacamgttttcatggtcgagcgactatttttaagtacgtgttccaccacccgcgttttggtccccagagcaccttaaagttgttcttggcctcccacgagctgtagg

SEQ ID NO: 190 - DNA, 430 bp, Artificial Sequence
  TR430 subtelomeric repeat
gacatggtagaattttagtgtccaaaccaaagtacacgttttagtccccggaggcccgtaaggctattttggcctcccgtgacacatgtttttgtcgtcgaacagcgatttcgtgcctcccgaccgccacccatgatttgaccatagagactggtaaggttgttttggcctcccgtgagctatagcacacgttttcatggccgagcgaccatttttatgtccgtgttcctccacacgtgtttttgtccccggagcaccttaaagcggttcttggcctcccgcgagctatatcacacatttccgtggccaaacaaccaattttatgtatccgacctgccaccttcgttttagaccggggaggccgttatggcaatttttttgccacccgtgagctatagcacacgattttatggaaacctagaccctaaat

SEQ ID NO: 191 - DNA, 10368 bp, Zea mays
ggttccggtggcaaaaactcgtgctttgtatgcacccgacacccgttttcggaaagggtgacgtgcgacaacgaaattgcgcgaaaccaccccaaacatgagttttggacctaaagtagtggattgggcatgtttgttgctgatgtagctgaggtgcccgatctttcggcgagtagagataattccgatttggcggaagatgacccttgcgatccgactacgacgagcaagcccgaggcgccaatgcaatcgctgaaccaactccctgtggttaccgaccttgctgatgcgagatcggcctgatcacgaagatcgtttcctgtgcgcaatcgaagaacgaacaagaacaagatgcgagcaatctaatctattactcgagggtggagttctgaatacacgaggacagcgcagatttgcgcgtgttcggaagtagctaaggctaacgtaaaacaaaactccccaaaaataaaggaggcgcagctcctgtataaatagagagggggcgcagcccctaggggcggccaaccctaggtcgtccattatgggccgcaattgggctggtcgtctatccttccgggccttcgttctttaacaacatgatgtagttcaattctcttgcacgggcccgagtcactggcccaggtggaaggggtggcgcctgggctggagaaggtgctgctggtgtagatgtgctcgtgttggtgttgatgtcctcatcatcctccccttcttgaactgaagtcgtcctcgacggcaactcctcatcttctcccgcatacggtttcaaatctgcaacattaaaactagtggaaacaccaaactccgcaggcaggtcaaggatataagcattatcattaatcttggttagtaccttaaaaggaccagcagcacgaggcatcaatttagaacggcgcaaagtaggaaaacgatcctttctcaaatgcaaccaaaccatatcaccaggttcaaaagtaactagtttccggcctttactaccagtaatctgatatttagcattagcagcagcaatgttttgttgagtttgttcatggagattaatcatttgttcaacatgtgcaagagcatctatgtgtggggcgtccgtagcatcaagcgaaaacaaagcaataggcgccctaggaatgtaaccataaacaatttgaaaagggcacatctttgtagaagaatgtgttgcatgattataagcaaactcaacatgaggtaagcaatcctcccaacgtttcaaatttttgtctaaaacagccctaagcatggtagacaaagttcgattaactacctcagtttgaccatcagtctgagggtgacaagtggtgctaaacagcaatttagttcctaatttattccacagagatctccaaaaatgactcagaaacttggcatcacgatccgagactattgtattgggaataccgtgcaaacgaataatctctctaaaaaacaattcagcaacattgctagcatcatcagtcttatgacaaggtatgaaatgagccattttggagaatcgatcaacaaccacaaaaatgctatccctccccttcttagttctaggcaatcccaaaacaaaatccatcgaaatatcaatccaagggaaagtaggaacaggcaaaggcatatacaaaccatggttgttcaaccgtgacttagctttctgacaagtagtgcagcgtgcaacaaggcgctcaacatcagcgcgcatccgaggccaaaagaagtgggcagccaacacctcatgtgtcttgtagacgccaaagtgccccatgagaccgcctccatgtgcttcctgtaacaacaaaagacgaaccgagctagctggaacacacagcttgttagcgcgaaacaggaacccatcctgtatgtgaaatttgccccatggtttcccattaatacaatggccgaaagcatctttaaaatcagcatcgtcaacatattgatcttttacagtgtgcaaaccaaagattttaaaatctaactgtgacagcatggtatagcgacgagacaaagcatcagcaataacattgtccttcccgttcttgtgtttaataatgtaaggaaaagactcaatgaattctacccatttagcatgacgacggttcagatttgtttgggtacgaatatgttttaaagcctcatgatcagaatgaattatgaactcacgatgccaaagatagtgctgccatgtatgtaaagtgcgcactaacgcgtaaagctccttatcataagtagaatatttcagactagcaccgcttaatttttcactaaaataagcaactggttttccttcttgtaataaaacagcacctagcccaataccgctagcatcgcattcaagctcaaatactttattaaaatcaggcaattgcaataggggagcttgggttaacttatctttcaaagtgctgaacgcttcctcctgcgaatcactccaagcaaatggcacatctttctttgtaagctcatgtagaggcgctgcaatggagctaaaatcacgaacaaatctgcggtagaaaccggcaagtccaagaaagctccgaatttgtgtgaccgtcgtcggtgtaggccactcccgaatggcagcaatcttgctgctatccacctcaatgccctgtggagtaacaacataaccaagaaacgagacacgtcgtgtgcaaaagatgcatttttccatgttagcgaataactgggcggcacgcaatgcatcaaaaacagcacttaaatgttccaaatgctctttcttagatttgctgtaaataaggatatcatcgaaataaacaaccacaaacaatcctatgaagggcctcagaacttcattcatcactcgcataaaagtgctgggagcattagtcaatccaaacggcataaccaaccattcatataaaccaaatttcgttttgaaggctgttttccattcatcacctagtttcattctaatctggtggtaaccactacgcaaatcaatcttagtgaaaataatggcaccactaagctcatctagcatatcatcaaggcgtggtataggatagcgataacgaatagtgatattattaatagcacgacagtctacacacatacgccatgacccatccttcttgggaacaagtaacacaggaacagagcaagggctaagagactcacgaatgtatcctttgtcaagcaacgcctttacctggcgctgaatctccttcgtctcatccggatttgtacggtatggtgcgcggtttggaagctgtgcaccgggaatgaggtcgatctggtgctcaatgccacgaagcggtgggagacccggtggtaagtctttgggaaagacatcagcgtactcctgcaaaaggttagcaaccatagggggaatagccaaagatggtgcatcatcaagtgaaatgaggacactagagcatacaagtgcatagcatggcaaatgagcaccgtgtagatcatcaaaatcagcacgtgtagcaagtaaaacaggagccttcaacttaatttcagaaggaacagagtgcgatggatcaagttgtttagcagttatagcagctcgggcaagatcatctttaacaatttgttcaggtgtcattggatgtataattattttctgacccttaaaaatgaaagaataatgattcgaacgaccatgatgcaagctatcagtatcatattgccaaggtcgaccaagtaacaaagagcatgcttccatgggaataacatcacaatcaacaaaatcagaataagcacccatggagaaaggaactcgcacggaacgcgtgatttttattttaccaccatcattaagccattgaatgtgatatgggttcggatgcttacgagtgggtaacgacaacttttcgaccagcatggtactcgccaaattgttgcaactgccgctgtcgataatgatgcgaattgaccgctcctgcacaacaccctttgtatggaacagagtgtgtcgctgattcttctcgggcaaagcgacctgtgtactgagaacacgctgcacaacaagactttcatacctatcagcgtcgcccgggttgacatgtacctccgccttagctgcatggtcagtggcaagtagtgcatgttcaatttcttcagaatcactagcggaagagtactcaccatcgtcacgaatgagtaaagtgcgcttgtttggacagtcccgaatcacatggccaaatcctctacagcgatgacactgaatatcccgtgtacgacctgtgggtggggcagtgctggctggtttggtcgtcttctcgcgtggagtagtggtggacgtggatggcgcagggggaactggtgctgaggtggatgtcgagcttcgtcctgcaaaagggttagaatattgcttcgagcggcgtccctgcacttcacgttcagctttgcaagcatattcaaataaagtagtcatatcataatattccttataatcaagtatatcttggatttcgcggtttaaaccaccacgaaaacgtgccatagcagcgtcgttgtcctccaatatcccacaacgaatcatacctttttgtaactcctggaaatagtcctcaacagattgagaaccttgctgaaaacgctgcattttattaagcaaatcacgagcataatacgaaggcacaaatcgatgtcgcatcgcagctttcaactgatcccaagtggttggaatggtagtgggatgttttattttaaactcacgccaccaaattaaagcaaaatcagtaaattcactaatagcagctttaacctgagaatgtgcagcaatatcatggcatgaaaatttttgttcaacctctaactcccaatcaagatatgcagcaggatcatatttgccattaaaaggtggaattttaaatttaatcttagaaaataagtcattagggggattacgaaccacacggcgtgcacgaccacggcgatctccatcgtcccactcagtgtcaccgccgtagtcctgctccatctttgtggtcaacgcatcaaggcgtgctaggatggtgtcgagtgtggtgcgagtcgccgtttgagcaaggtcaagctggttgaaacgctcggtcgtcgaagtgaccgttgaatcaagccgttcatgcatcgtcctaatgtcatcagcaagtccatcaacttgtccctttacttccagcaactgggcatccaccgtgtcatgtgctcctgccatagttagcgcaaacaccaaaacaccaaaaaaaacgacaaaaacaggggtgtactgctcacaaggcgctcacactagtgctgttatcaaattcttatccgttcttaccaagccacagtggtgaactgcaaccaacaggtggaaccggtgaaagattggatgagcgattgcctggagaaacagaaacctactcgttgtagaaatatgtggagttctgggtaggctgcactcaagtcaaggattagcacgaccaaacaataatgcaaagttgaattatagtgcaaaacacgaaactatattgctggccacaagtgcaaaggacggatggaactagcagaatggcagtaccgtaaatattgtactagcgaggccactagtaggaatcacaagtgattttgtttttcttttttgtatgatttttttggtatttttctcagcacaagaagcaacaaaataggagctacacgaagtttcacctaaaacagagttcaaatgtggtctacagaaaatcagaaagttctctaaaaagcgtgcgagaactttgaaggattttttctttattttcctgaattttttttgacaattttgtcgaacccaaacagaccgaaggtcagtttggccggcctcagaatggtgtcaactagctcctgtaaaaatttcagatttttcggacacccgagcgaaaagttatgcccggtttaaggaaggtacctcaaattatgttttcaaacgaccggaatgaaacaaccgtatcctttctccttcgttgttttttgtttctgtttttttttttacgtaaccgaaggagaaaaacaaggaaacgatgttgactcggtttgtttttttttctgtttttttttctgttttttttcgtaaccgaaggagaaaatcaaggaaaacagccgttgactcggtttgttttttctgtttttttttgacgtaaccgaaggagaaaaacaaggaaacaatgttgactcggtttgtggtgtgatcaaacgagagatggtggcggcgctagggtttgaatggtggaagaacacaatgcaaccagcaacaaatgacgcgaaagcacacaaattcaacaatgcagattattgaaagaaagtgcgaggctcaaaagggtgctgggataagatctaacctgaatttttatgtggttttgtggactgtaggaaaaaaaaacgctcgataaactcaccgatcaacctagaaatctgataccaattgatgaagctgaggtgcccgatctttcggcgagtagagataattccgatttggcggaagatgacccttgcgatccgactacgacgagcaagcccgaggcgccaatgcaatcgctgaaccaactccctgtggttaccgaccttgctgatgcgagatcggcctgatcacgaagatcgtttcctgtgcgcaatcgaagaacgaacaagaataagatgcgagcaatctaatctattactcgagggtggagttctgaatacacgaagacagcgcagattagcgcgtgttcgagagtagctaaggctaacgtaaaacaaaactcaggaaataaaggaggcgcagctcctgaataaatagagagggggcgcagcccctaggggcggccaaccctaggtcgtccattatgggccgcaattgggctggtcgtctattcttccgggccttcgttctttaacaacatgatgtagttcaattctcttgcacgggcccgagtcactggcccaggtggaaggggtggcgcctgggctggagaaggtgctgctggtgtagatgtgctcgtgttggtgttgatgtccgcatcaacatcgcaatcaacataatcagaataagaacccagcgaaaaggggacacgtaccgaacgtgttacctttattttaccaccatcattaagccattgaatgtgatacggatgtggatgtgtgcgagtgggcaaggataatttctctaccaacgctgtacttgccaaattgttgcagctgccactatcgatgatgatgcgaatcgaccgttcgtgcacgacgcccttggtatggaatagagtgtgtcgctgatttttttcggcctgggcaacctgtgtgctgagaacacgctgcacaacaagactctcatacctatcagcgtcgatgggatcaacgtggacttcctcattttctgcatggttagtggcaatcatagcatgactagtttcctcagaatcactggctgaagagtactcaccattgtcacgtataagcaaggtacgcttgtttgggcagtcccgaatcatgtgcccaaaccctctgcaacgatggcactgaatatcccgtgtacgtcctgtggaagaagcggcgcctttggcagggggcgccactggcttggccggccctgtgcgcgatgtagtgctaggcgtaggaggtgcagggctggaaggagttgagctgtgtgttggaccccggcctgcaaaagagttagtatatgtctttgatcgtcgtccctgcacttcacgttcagctttgcaagcatattcaaacaatgtggttatatcaaaataatccttataatcaagtatatcctgaatttccctgttcaaaccaccacgaaaacgcgccatagcagcgtcatctgactcaaccaaaccacaacgaagcatacccttttgcaactcctggtaatattcctcaacagattgtgaaccttgttgaaaacgctgcattttgttaagcaaatcacgagcataataggaaggaacaaatctgtggcgcatggcagtttttaattgggtccaagtaatgacactgttaatgggaagtttttgtttatactcacgccaccaaattaaagcaaaatcagtaaattcactaatggcagccttcacttggctattagcaggaatatcatggcatgaaaatttctgttctacctctaattcccaatcaagatatgcagcaggatcatatttaccattaaaagatggaattttaaatttaatcttagaaaataagtcattagggggatgacgaaccacacgacgtgcacgaccacggcgatctccatcgtcctgctcagtgtcaccgccgtattcctgctccatctttgtggtcaatgcatcaaggcgtgccaggatggtgtcgagtgtggtgcgagtcgccgtttgagcaaggtcaagttggttgaaacgctcggtcgtcgaagtgatcgttgaatcaagccgttcatgcatcgtcctaatgtcagcagcaagtccatcaacttggccccttacttcctgcaactgggcatccaccatgtcgtgtgctcctgccatagttagcgcaaacaccaaaaggagaaaaaccaacgacaaaaacaggggtgtactgctcacaaggcgctcacactagtgctgttatcaagttcttatccgttcttaccaagccacagtggtgaactgcaaccaacaggtggaaccggtgaaagattggatgagcgattgcttggagaaacagaaacctgctcgtcgtagaaatatgtggagttgtgggtaggctgcactcaagtcaaggattagcacgatcaaacaataatgcaaagttgaattatagtgcaaaacacgaaactatattgctggccacaggtgcaaaggatggatggatggaaatagcagaatggcagtaacgtaaatattgtactagtgatgccaaaaaggcactagtacaaatcacaggtgattttgtttttcttttttgtatgatttttttgatatttttctcagcacaagaagcaacaagataggagctacacgaagtttcacctaaaacagatatcagatgtggtctacagaaaatcaggaagttctctgaaaagcgtgcgagaactttgacggatttttttctttattttcctgaatttttttgacaattttgtcgaaccccaaacagaccgtaggtgagtttggccgggctcagaatggtgtcaactagctcctgtaaaaatttcagattttttggacacccgagcgaaaagttatgcccggtttaaggaaggtaccctcaagttatgttttcaaacgaccgggatgaaacaaccgtatcctttctccttcgttgtttttttttgtttctgttttttttttgacgtaaccgaaggagaaaaacaaggaaacgatgttgcctcggtttttttttttctgttttttttcgtaaccgaaggagaaaaacaaggaaacggccgttgactcggtttgttttttctgtttttttttacgtaaccgaaggagaaaaacaaggaaacaatgttgactcggtttgtggcgtgatcaaaggggagatggtggcggcgctaggatatgaatggtggaagaacacaatgcaaccagcaacaaggaaacgcgaaagcacacaaattcaacaatgcagattattgaaagaaagtgcgaggctcaaaagggtgctgggataagaactaacctgaatttttatgtggttttgtggactgtaggaaaaaaaacgctcgataaactcaccgatcaacctggaaatctgataccaattgatgtagctgaggtgcccgatctttcggcgagtagagataattccgatttggcggaagatgacccttgcgatccgactacgacgagcaagcccgaggtgccaatgcaatcgctgaaccaactccctgtggttaccgaccttgctgatgcgagatcggcctgatcacgaagatcgtttcctgtgcgcaatcgaagaacgaacaagaacaagatgcgagcaatctaatctattactcgagggtggagttctgaatacacgaggacagcgcagatttgcgcgtgttcggaagtagctaaggctaacgtaaaacaaaactcccaaaaataaaggaggcgcagctcctgtataaatagagagggggcgcagcccctaggggcggccaaccctaggtcgtccattatgggccgcaattgggctggtcgtctatccttccgggccttcgttctttaacaacatgatgtagttcaattctcttgcacgggcccgagtcactggcccaggtggaaggggtggcgcctgggctggagaaggtgctgctggtgtagatgtgctcgtgttggtgttgatgtcctcatcacatgtttggggtggtttcgcgcaatttcgttgtcgcacgtcacacattccgaaaacggttgtcggggtgcatacaaagcacgagtttttgacaccggaacc

SEQ ID NO: 192 - DNA, 32 bp, Artificial Sequence; identical to SEQ ID NO: 5
  Telo-31overgo primer1 Biocode 75319

SEQ ID NO: 193 - DNA, 31 bp, Artificial Sequence
  Telo-31overgo primer2 Biocode 39612
ccctaaaccctaaaccctaaaccctaaaccc

SEQ ID NO: 194 - DNA, 708 bp, Zea mays
  source (0)...(0): Maize BAC clone full insert sequence contig bacm2.pk170.a08.fis1
  misc_feature (1)...(708): n = A,T,C or G
ggcgaannnnnnnnnnnnnnnnnnnnnnnnnnnnnnnnnnnnnnnnnnnnnnnnnnnnnnnnnnnnnnnnnnnctcatgtttggggtggtttcgcgcaatttcgttgtcgctcgtcacccattccgaaaacgggtgtcgggtgcatacaaagcacgagtttttgccaccggaaccatttcttcgttttcgcaaagaacatgcccaatccactactttaggtccaaaactcatgtttggggttgtttcgcgcaatttcgttgtcgcacgtcacacattccgaaaacgggttgtcggggtgcaaacaaagcacgagtttttgccaccggacccatttcttcgtttttcgcaacgaacatgcccaatccacaactttaggtccaaaactcatgtttggtgatgaggacatcactgccatcaatacaaccacaccagcgacccccttcaccatttaatcatggaccagtgaaacgagtccatgcacgtaaatttaattatcaggtgaactcgttccttgttattgaagctaatcattccttaaatgaggtactaataccttgtgattactttattatgctaaggtgtttgggaggtgaaccatctagaatttgagaaggcaacaaggcaataaaagctgctccacttgaagggatttcgtaactgcagcaagtgctagttgaagaggtcatatctttcaactcccaaggcca

SEQ ID NO: 195 - DNA, 530 bp, Zea mays
  source (0)...(0): Zea mays BAC clone full insert sequence contig bacm2.pk170.a08.fis2
  misc_feature (1)...(530): n = A,T,C or G
tgannnnnnnnnnnnnnnnnnnnnnnnnnnnnnnnnnnnnnnnnnnnnnnnnnnnnnnnnnnnnnnnnnnnnnnnnnnngtagatcaatatgtcatcaaagtatactaccacaaattttccaatgaaggcacgcaaaacctcgttcattaatctcatgaaagtgctaggtgcattagttaacccaaaaggcatgactaaccactcatacaatccgaacttagttttgaaagcagttttccattcatctcccaatttcatacgaatctggtggtacccactacgcaaatcaactttagaaaagacgatggcaccactcaattcatcaagcatatcatctaaacgtggaatagggtgtcgataccgtatcgtgatattattaatagccctacaatcaacacacatacgccatgttccatcttttttaggcactaaaataaccggaacagcacacggactaagagactcacgcacgtaacctttgtcgagtagttcttgcacttgtcgctgaattccttttgtttcctctgga

SEQ ID NO: 196 - DNA, 655 bp, Zea mays
  source (0)...(0): Zea mays BAC clone full insert sequence contig bacm2.pk170.a08.fis3
  misc_feature (1)...(655): n = A,T,C or G
ggcggcgaannnnnnnnnnnnnnnnnnnnnnnnnnnnnnnnnnnnnnnnnnnnnnnnnnnnnnnnnnnnnnnnngaaccatttcttcgtttatcgcaacgaatatgcccaatccactactttaggtccaaaactcatgtttggggtggttttgcgcaatttcgttgtcgcacgtcatacatttcgaaaacgggttgtcgggggtgcatataaagcacgagtttttaccagcggaaccatttcttcgtttttcgcaacgaacatgcccaatccactactttaggtccaaaactcatgtttggggtggtttcgctcaatttcgttgtcgcacgtcacccattccgaaaacgggtgtcggggtgcatacaaagcacgagttttgatgaggacatcactatcattgatacaaccataccagtgaccacttcaccatttgtaactaatcaaggaccaatgacacgagcctgtgcacgtaaacttaattatcacgtgaactcgatccttgctattgaagctaattcttctttaaatgaggtactaaagccttgcgatgactttattaatgctccggggtttgggaaagtgaaaccatcctgggaattaaaaaaagggaacaaggcaaaaagggctgctggcccccgagttgatttcggaaa

SEQ ID NO: 197 - DNA, 758 bp, Zea mays
  source (0)...(0): Zea mays BAC clone full insert sequence contig bacm2.pk170.a08.fis4
  misc_feature (1)...(758): n = A,T,C or G
atccnnnnnnnnnnnnnnnnnnnnnnnnnnnnnnnnnnnnnnnnnnnnnnnnnnnnnnnnnnnnnnnnnnnnnnnnnnnnnnnnnnnnnnnnnnnnnnnnnnncgtgaacatcgtctccttccccaatcgagttattccacaccctctcatcgaaagatcgggcaatcacccaacgggtgcacatcagttggtaatcagagcaaggtttatcggtgagagatttacttttcttcgctgttttgttatctcctatagtccagaaaaagccaaaaaatagtagattagttttaccgcaatcctataaaccattgagcatttactagtactacttagttagggcttgttgagtttttggttgcatcggttgtgtcgagttgctgggtctagttttatcctttagagttttgagttctaccacgtttttgtcaccacgagatccacatccacataaacatctctgggtcgttttttgcaaccacggatacatctcaggtccgatttggaagttaaaatacaatctggaaagcctatcttatcttcttttcaacggatctggacttggtccaaaatttcttctggagggtccgcaatcctcggaaagttttggggatttcaatttaaaaaaatttgttaaatcctaatttaagggggcgttaaacaaaatcttttttggtttgggtgtgccaaggggaaaaaaaagggtttgggccctttcccaaaaaaccggggagggggggaaaaaaaaagaatttggaaa

SEQ ID NO: 198 - DNA, 722 bp, Zea mays
  source (0)...(0): Zea mays BAC clone full insert sequence contig bacm2.pk170.a08.fis5
  misc_feature (1)...(722): n = A,T,C or G
ngcccgtaacactcctataggcgagnnnnnnnnnnnnnnnnnnnnnnnnnnnnnnnnnnnnnnnnnnnnnnnnaaaacgaagaaatggttccggtggcaaaaactcgtgctttgtttgcaccccgacaacccgttttcggaatgtgtgacgtgcgacaacgaaattgcgcgaaacaaccccaaacatgagttttggacctaaagtagtggattgggcatgttctttgcgaaaacgaagaaatggttccggtggcaaaaactcgtgctttatatgcacccgacacccgttttcggaatgggtgacgtgcgacaacgaaattgcgcaaaaccacctcaaacatgagttttggacctaaagttgtggattgggcatgttcgttgcgaaaaacgaagaaatggttccgctagcaaaaactcgtgctttgtgtgcaacccaacacccgttttcggaatgtgtgacgtgcgacaacaaaattgcgcgaaaccaccccaaacatgagttttggacctaaagtactggattgggcatgttcgttgcaaaaaacgaagagatggttccggtggcataaactcgtgctttgtatgcacctgacacccgtattcggaatgcgtgacgtgcgacaactaaattgcgtgaaaccaccccaaacatgagtattggacctaatgtagctgattgggcacgtacgttgcaaaaaacgaagagatgctctgctggcaaa

SEQ ID NO: 199 - DNA, 512 bp, Zea mays
  source (0)...(0): Zea mays BAC clone full insert sequence contig >bacm2.pk170.a08.fis6
  misc_feature (1)...(512): n = A,T,C or G
ngacgcgcgtatacgactcctatcgggcgagtgggnnttcgacgcccgtcgaggtcgacggtacattcaacaagagcgttcatctcccaaggttgtttagtgcaaataagtacttgttggaaagcgctcttcgtctactttctggcggctgatgaatcaatgggagaaaccaaacgacacgtccagaaactgtagagagagcttcgttctccaccagaacttctttctattcctctatttaagcaactagcagccaccaaaggacttgggtttttgtttgatgtaagtttagcctttgctacttccttgtaaacgcgtgtgtctgctagaccacccggatacttgaaacagaaccccaactctatcagatccgtgagcgtctgctttttatcttgttcttgcttgttctcgattgcttgcaggttcaaggttgttcttggcacggcaagagcagcaacaacaggagctggtgtaactatcgctaaggcgcagcacccttgtggttgttgtag

SEQ ID NO: 200 - DNA, 647 bp, Zea mays
  source (0)...(0): Zea mays BAC clone full insert sequence contig >bacm2.pk170.a08.fis7
ttaccaaagagcgagttccaaggccgtttaatgcaaataaatacttgttggaaagctcccttcgtctacttgctggtggatcaagaattaatgggagactacacccgaggcgtccaggaactgccgagggaacttcatgactccaccagaattccttcttcctatttctctatttaagcaactagcagccaccaaagaacttgggttttgtttgatgtaagtttagcctttgctacttccttgtaaacgcgtgtgtcggctagaccacccgaatacttgaaacgggaccccaactttatcagatccgtgcgtgtttgcttgttatcttgttctagcttgttctcgattgcttgcaggttcaaggctgttcttggcacggcaagagcagcaacaacaggagccggtgtaactatcgctaaggcgcagcacccttgtggttgtttgtatcggatagcacaacgtcgacctccaccccaaatcgaagttatcaggagacggtgtacctgttgctcaaggccccacaccatcttggttgtggaattcgggaagccaacgtcgttctcccacaaatttttccacctccttcatctttcatccaaaaaacggggaccccttccaccccttgggtttctcaaggggggaggaag

SEQ ID NO: 201 - DNA, 1024 bp, Zea mays
  source (0)...(0): Zea mays BAC clone full insert sequence contig >bacm2.pk170.a08.fis8
gtagcatgacgaagttaagatctttggcacgagcccgagtgattggcccagctaatgaaggaagtggcgcttgatgtggaggtgctgctggtgtagtcgtactcatagtgatgtccttatcatcctccccttcttgaagtgaagtcgtcctcgacgacaactcctcatcctcggccatatatggtttcaaatctgcaacattaaaactagtggaaacaccaaattccgcaggcaggtcaaggatataagcattatcattaatctttgttagcaccttaaaaggaccagcagcacgagtcattaatttagaacagcgcaaagtaggaaaccgatcctttctcaagtgctaccaaaccatatcacctggctcaaaagtaacatgttttcttcctttactaccagcaacctgattttttgcattagtagcagcaatgttctgttttgtttgttcatgtatggtaatcatttgttcaacatgtgcagcagcatctacatgtggggcgttcgaagcattaagtgaaatcaaatcaataggtgccctaggaatgtaaccataaacaatctggaaaggggcacatctttgtagaagaatgcgtggcatgattgtaagcaaattcaacatgaggcaagcaatcctcccaacgtctcaaattcttgtctaaaacagccctaagcatggtagataaagttctatttactacctcagtttgtccatcagtctgagggtgacaagtagtgctaaacaacaatttagttcccaatttattccaaagagatctccaaaaatggcttagaaacttagcatcgcgatcagagactattgtttttggaataccatgtaaacgaataatttctctaaagaacaattcagcaacaatgctagcatcatcagttttatgacaaggtataaagtgagccattttagagaatctatcaacaaccacaaaaatactatccctccccttcttagttctaggcaagcccaaaacaaagtccatagagatatcaagccaaggagaagaag

SEQ ID NO: 202 - DNA, 776 bp, Zea mays
  source (0)...(0): Zea mays BAC clone full insert sequence contig bacm2.pk170.a08.fis9
ttctaaagcaagactaagcatcagaaaaccttttaataaaacaggtaatcaaggaattgtaataaattccaaggaaggaaatgcaacaagtgtttagcacacaactcctatcacctaatgcatcattcaagtgataattattaaaattcaaggaaagggtaaatgcaccagggcttgccttgtgttgtaggggagtcgggagctgtcccacagatatcaaaataaaaacagttcttggcaggtggagcctcagttggtggtgcagtctcttcttcaacacttacttcttcttcattttctatacataaccatatatgaacatgaatgcacatgtgatgctatgaatatgcaattataatagagatacttcaagttgtatcttgaatacaactttccttcatggtacacctgggtaattagggttttctgagtgaataccctagtagggttaagtagttttattcttaagaggctagggttttggggttttgggaccaaacaatgtccaaagcataccaaactttgtccaaaggctctaattaccaaattaagcttatacaaaaagttttatgatttttggagttatcaaataatttctaaaattccaaaagtctaggtttaggccttctcaaatactaaataattcatagttggggctaaaaatctgggaactatttttataaacactatgggaattttagaggctagtaaatttgatcccatatttttattatttttctagaatctctaaggatttcaaactttcctggaaaaag

SEQ ID NO: 203 - DNA, 1083 bp, Zea mays
  source (0)...(0): Zea mays BAC clone full insert sequence contig bacm2.pk170.a08.fis10
tttcatgaacctagtcattacatcttccatgcattcatctaaacgagcaaacatggtataaattttaaaatcataataataatctttcacagtcctagcaccctgctttaaggtgtctaatttagaaagcaaatgatcagaatagtatgcaggaatgaatgcatctctaaaatgaagtttgaagtcttcccaagattgtggaactttgttatgcctacaaatgtatttccattccatcaatgcgtgctcagttaacaaattagaggcaatataaatcttttgtttttgagatagatcatgcttatcaaattccttatctacctttagctcccaatcaatgtatgcatgaggatcgaatttaccggcatatgaaggcaagtgtcgaatgatgccttgaatataatgttcagttggctcaaaaatctccatatcacctgccatgtttaataaagacaagaaaacaataaaaatatctttgatcctataaactactaggaatcattgttgtaatctctcattctcaaactggttaagcaagttcttacaaattctcaccacgcaatacaggaggtgccggcaaacagcaagaacaacaacaatggtggcagctagcacaacctggtggtgttgtagaaaaatttgtggatttataggtagctgcaatttcaatagttccaaggaatagctagtaccacgttagccacaacaagttgaataaacgttccacaatggtgttgtgctggtcctagtccaaaccgtaatagagacgcgagccgttacacaaatagtatcaccagaagctcagaacagcaatcggaatcctgaaactataaaaagatggcacacaaactgccttttgttttgtcgcacttacaaattttatctaccaaaattcagaactggtttttctctctctctctattttttgcacgtgtctttttttttgctgattagtgcggcttttttttatgcactcgccttttgctttctcttctttttggttgaattacagcaagaggtctaaactggtgattgaaacaaggtggcgcgaactcgaaactctagcgttaagaaaactttaga

SEQ ID NO: 204 - DNA, 1050 bp, Zea mays
  source (0)...(0): Zea mays BAC clone full insert sequence contig bacm2.pk170.a08.fis11
tgtgacgtgcgacaacgaaattgcgcgaaacaaccccaaacatgagttttggacctaaagtagtggattgggcatgttctttgcgaaaacgaagaaatggttccggtggcaaaaactcgtgctttatatgcacccgacacccgttttcggaatgggtgacgtgcgacaacgaaattgcgcaaaaccacctcaaacatgagttttggacctaaagttgtggattgggcatgttcgttgcgaaaaacgaagaaatggttccgctagcaaaaactcgtgctttgtgtgcaccccaacacccgttttcggaatgggtgacgtgcgacaacgaaattgcgcgaaaccaccccaaacatgagttttggacctaaagtagtggattgggcatgttcgttgcgaaaaacgaagaaatggttccgatggaaaaaactcatgcttttatgcacctcgatacccgttttcagaatgggtgacgtgcgacaacgaaattgcgcgaaaccaccccaaacatgagttttggacctaaactagtggattgggcatgttctttgcgaaaacgaagaaatggttccggtggcaaaaactcgtgctttgtatgcacccgacacccgttttcggaatgggtgacgtgcgacaacgaaattgcgcaaaaccacctcaaacatgagttttggacctaaagttgtggattgggcatgttcgttgcgaaaaacgaagaaatggttccgctagcaaaaactcgtgctttgtgtgcaccccaacacccgttttcggaatgtgtgacgtgcgacaacgaaattgcgcgaaaccaccccaaacatgagttttggacctaaagtactggattgggcatgttcgttgcgaaaaacgaagaaatggttccggtggcaaaaactcgtgctttgtatgcacctgacacccgttttcggaatgggtgacgtgcgacaacgaaattgcgcgaaaccaccccaaacatgagttttggacctaaagtagtggatcgggcacgttcgttgcgaaaaactaagaaatggttccgctggcaaaaactcg

SEQ ID NO: 205 - DNA, 774 bp, Zea mays
  source (0)...(0): Zea mays BAC clone full insert sequence contig bacm2.pk170.a08.fis12
  misc_feature (1)...(774): n = A,T,C or G
gatcgtttctgatcgtgatgctaaatttcttagtcatttttggaggactttgtgggcaaaattggggactaagcttttattttctactacatgtcatcctcaatctgatggtcaaactgaagttgtgaatagaactttgtctactatgttaagggcagttctaaagaagaatattaagatgtgggaggactgtttgcctcatgttgaatttgcttataatcgatcattacattctactacaaagatgtgcccatttcagattgtatatggtttgttgcctcgtgctcctattgatttaatgcctttgccatcttctgaaaaactaaattttgattctactaggcgtgctgaattgatgttaaaactgcatgaaactactaaagaaaacatagagcgtatgaatgctagatataagtttgctagtgataaaggtagaaaggaaataaattttgaacctggagatttagtttggttgcatttgagaaaggaaaggtttcctgaattacgaaaatctaaattgttgcctcgagctgatggaccgtttaaactgctagagaaaattaacgacaatgcatataggctagatctgcctgcagactttggggttagccccacatttaacattgcagatttaaagccctacttgggagaggaagttgagcttgagtcgaggacgactcanatgcaagaaggggagaatgatgaagacatccacactactgatacatctatgccaatacaagtaccaatttctgggtccattactcgcgctcg

SEQ ID NO: 206 - DNA, 679 bp, Zea mays
  source (0)...(0): Zea mays BAC clone full insert sequence contig bacm2.pk170.a08.fis13
ccaaagagatctccaaaaatggcttagaaacttagcatcacgatcagagactattgtttttggaataccatgtaaacgaataatttctctaaagaacaattcagcaacaatgctagcatcatcagttttatgacaaggtataaagtgagccattttagagaatctatcaacaaccacaaaaatactatccctccccttcttagttctaggcaagcccaaaacaaagtccatagagatatcaagccaaggagaagaagggacaggcaaaggcatatacaaaccatggttgttcaaccgtgacttagctttctgacaagtagtgcagtgtgcaacaaggcgctcaacatcagcgcgcatccgaggccaaaagaagtgggcagccaacacctcatgtgttttgtagacgccaaaatgccccatgagaccgcctccatgcgcctcctgtaacaacaaaagacgaaccgaactagctggaacacacagcttgttagggcgaaataggaacccatcctgtatgtgaaatttgccccatggtatcccatttatacaatggccgaaagcatctttaaaatcagcatcgtcaacatattgatccttcacagtgtccaaaccaaagattttaaaatctaattgtgacaacatggtatagcgacgagacaaagcgcatcagcaataacat

SEQ ID NO: 207 - DNA, 1008 bp, Zea mays
  source (0)...(0): Zea mays BAC clone full insert sequence contig bacm2.pk170.a08.fis14
tttctgatcgtgatgctaaatttattagtcatttctggaggactttgtgggcaaaattggggactaagcttttattttctactacatgtcatcctcaaactgatggtcaaactgaagttgtgaatagaactttgtctactatgttaagagcggttctaacgaagaatattaagatgtgggaggactgtttgcctcatgttgaatttgcttataatcgatcattgcattctactacaaagatgtgcccatttcagattgtatatggtttgttgcctcgtgctcctattgatttaatgcctttgccatcttctgaaaaactaaattttgatgctactaggcgtgctgaattgatgttaaaactgcatgaaactactaaagaaaacatagagcgtatgaatgctagatataagtttgctagtgataaaggtagaaaggaaataaattttgaacctggagatttagtttggttgcatttgagaaaaggaaaggtttcctgaattgcgaaaatctaaattgttgccctcgagccgatggaccgtttaaagtgctagagaaaattaacgaccatgcatataggctagatgtgcctgcagactttgggggttagcccactttttaacattgcaagatttaaagcccctactttgggaaaaagaattttaaacttgagttgaaggacccacccaatatgccaaaaaggggggaaaaatgtttgaaaaacctccccccccatattggatacacctttttgccaaaaacaagaaacccattttttgggggccccattatacttttgggggccaaaaaaaaccggcggcttgtttcttcttaaaaccaaaccaaccggggggagatcccacctcgttgagaggggcgcgccctcaatattttacaacccgggcggggggcccctttttttttttttaaaaaacccgcgggggaaaaccccggggggggaaaaggtttttaaaagggggggcttccttgtcttgagaaaaaaacccttgt

SEQ ID NO: 208 - DNA, 488 bp, Zea mays
  source (0)...(0): Zea mays BAC clone full insert sequence contig bacm2.pk170.a08.fis15
tctgagcgctccgcaatcatcgtagagatttctggactttctatattaacaagatttgttaaatctgatttaaaggggctgttagcaatatctttattgtttgggttgtcatagtgaaaaaaagggtttaggcccctgcaaaaaaaaagaagaagaagaagaaaaagaatagaaaagaaaaaaaagaggaaaagaagaagaagggggctgaatctctaaatctgttgtttctctttgtgctgtgctagttgttctttttcagtgactacatttatgcctaggaccagcacagtaccaccgttgaacgattattcagcttgcttttgtaactaacgtggtactggtgtattccttgcttcagcccacctacaactctacatatttcgactacagtttgacaggtcgtgttgctgcggcaccgatacacttattccacggttgcagacttgttggttgctgacccctcctgttgtgcaaggtaagaattg

SEQ ID NO: 209 - DNA, 1142 bp, Zea mays
  source (0)...(0): Zea mays BAC clone full insert sequence contig bacm2.pk170.a08.fis16
  misc_feature (1)...(1142): n = A,T,C or G
gacatgagatgtatccgtggtggcaaaaacgaaccagacatgtttatggtgatggtggatctcgtggtgaccaaaacgtggtagaactcaaaactctaaaggaataaactaagaccagcaactcgacacaaccgatgcaaccaaaaactcaacaagccctagctaagtagtactagtaaatgctcaatggtttataggattgcggtaaaactaatctactttttttggctttttctagactataggagataagaaaacagcgaagaaaagtaattctctcaccgataaaccttgctctgattaccaactgatgtgcacctgttgggtgattgcccgatcttttgatgagagggtgtggaataactcgattggnggaggagacgacgttcacggcccgactacagccttccaaagacgctgcgccttagcaaccgatacaccacctcctatggctgtcacgatcttgtggagcgtgacaccctggccactagggcactcgtcctgaaagcaatcgaagaactagcaagaacaagtagaacaagtactgaattaccagatctaaatgtaggtttaaaaatcaaactccaatatggtggggttccgaagacaagaagacgggcggctgaactagcacgcgcgcttgcaagcaagtagcgagagctaaacttgatctaaacaaaactcgctgttcttggtggcggctagggggtttataaacatgggaggacgaccacaagggtattggggtcgtgctgcaaccctaggatgcgtccctaatggacctaacttgatacacgacccattgggccaaaatagggtgacgcagcaccatgggcagaaaaggcaggaaatgtctcggtaagaaaacaatgattatggcggcctcagaacagatatgactataattccggatccatatgaaagtagacttgataagctttccatgttgtgcttgaacattccaatccgagcccgcatctgaccgtggtgaccgtcacaagttggtgttcttctgcagtccgaatccagcatgttcaaatccttttccctttcggtcttctccctgattcctacgcaaaacaagagtgcacgggtctccatggtctaaatatgatggacatgaactcaagagtgtaatcacc

SEQ ID NO: 210 - DNA, 673 bp, Zea mays
  source (0)...(0): Zea mays BAC clone full insert sequence contig bacm2.pk170.a08.fis17
  misc_feature (1)...(673): n = A,T,C or G
cctgttgattgcagttcaccactgtggcttggtaagaacgtataagaacttgataatagcattccattgagcgagcaagttgtcaccaccattcccctgttgtcgtcggtttgtctcattttggtgttttggtgtttgcgctaactatggcaggagcacacgacatggtggatgcccagttgcaggaagtaaggggacaagttgatggacttgctgctgacattaggacgatgcatgaacggcttgattcaacgatcacttcgacgaccgagcgtttcaaccaacttgaccttgctcaaacggcgactcgcaccacactcgacaccatcctggcacgccttgatgcattgaccacaaagatggagcaggaatacggcggtgacactgagcaggacgatggagaccgccgtggtcgtgcacgccgtgtggttcgtcatccccctaatgacttattttctaagattaaatttaaaattccatctnttaatggtaaatatgatcctgctgcatatcttgattgggaattggaggtagaacagaaattttcatgccatgatattcctgctaaatagcaagtgaaggctgcaattagtgaatttactgattttgctttanttnggtgggcgtgatatnaacaaaaacttttccattacagtgtcattacttggaccca

SEQ ID NO: 211 - DNA, 964 bp, Zea mays
  source (0)...(0): Zea mays BAC clone full insert sequence contig bacm2.pk170.a08.fis18
  misc_feature (1)...(964): n = A,T,C or G
tatgcacctcgatacctgttttcagaatgggtgacgtgcgacaacgaaattgcgcgaaaccacctcaaacatgagttttggacctaaagtagtggattgggcatgttcgttgcgaaaaacgaagaaatggttccgctggtaaaaactcgtgctttgtatgcaccccgacacccgtttttgaaatgggtaacttgtgacaacgaaattgcgcgaaaccaccccaaacatgagttttggacctaaagtagtggattgggcatgttcgttgcgaaaaacgaagaaatggttccgctggcaaaaactcgtgctttgtatgcaccccgacacccgttttcggaaggtgacgtgcgacaacgaaattgcgcgaaaccaccccaaacatgagttttggacctaaagtagtggattgggcatgttcgttgcgaaaaacgacaaaatggttccggtggcaaaaactcgtcctttgtatgcacccgacacccgttttcggaatgggtgacgtgcgacaacgaaattgcgcgaaaccaccccaaacatgagttttggacctaaagtagtggattgggcatgttcgttgcgaaaaacgaagaaatggttccggtggcaaaaacacgtgcttttatgcacctcgatacctgttttcagaatgggtgacgtgtgatgtagctgaggtgcccgatcttttggcgagtagagataattccgatttggcggaagatgacccttgcgatccgactacgacaagcaagcccgaggcgccaatgcaatcgctgaaccaactccctgtggttaccgaccttgctgatgcgagatcgacctgatcacgaagatcgtttcctgtgctcaatcgaagaacgaacaaganaaagatgcgagcaatctaatctattactcgagggtggagttctgaatacacgaagacagcgcagatttgcgcgtgttcgagagtagctaaagctaacgt

SEQ ID NO: 212 - DNA, 892 bp, Zea mays
  source (0)...(0): Zea mays BAC clone full insert sequence contig bacm2.pk170.a08.fis19
ttagaacttcattcatcactcgcataaaagtgctgggagcattagtcaatccaaacggcataaccaaccattcatataaaccaaatttcgttttaaaagccgttttccattcatcacccagtttcattctaatccggtggtaaccactacgcaaatcaatcttagtgaaaataatggcaccactaagctcatctagcatatcatcaaggcgtggtataggatatcgataacgaatagtgatgttattagtagcacgacagtctacacacatacgccatgacccatctttcttgggaacaagtaacacaggaacagagcaagggctaagagactcacgaatgtatcccttttcaagcaacgcctgtacttggcgctgaatctccttcgtctcatccggatttgtacggtacggtgcgcggttcggaagctgtgcgccgggaatgaggtcgatctggtgctcaatgccacgaagtggtgggagacccggtggtaagtctttgggaaagacatcagcgtactcctgcaaaaggttagcaatcatagggggaatagccaaagatggtgcatcatcaagtgaaatgaggacactagagcatacaagtgcatagcatggcaaatgagcaccgtgtagatcatcaaaatcagcacttgtagcaagtaaaacaggagcctttaacttgatttcagaaggaacaaagggcgatggatcaagttgtttagcagttatagcagctcgggcaagatcatctttaacaatttgttcaggggtcattggatgtataattattttctgacccttaaaaatgaaagaataatgattcggacgaccatgatgcaagctatcagtatcatattgccaaggtcgaccaagtaacaaagagcatgctttcat

SEQ ID NO: 213 - DNA, 933 bp, Zea mays
  source (0)...(0): Zea mays BAC clone full insert sequence contig bacm2.pk170.a08.fis20
tttctttgtaagctcatgtagaggcgctgcaatggagctaaaatcacgaacaaatctgcggtagaaatcggcaagtccaagaaagctccgaatttgtgtgaccgtcgtcggtgtaggccactcccgaatggcagcaatcttgctgctatccacctcaatgccctgcggagtaaccacataaccaagaaacgagacacgttgcgtgcaaaatgtgcacttttccatgttaccaaacaagcgagcagcacgcaaagcataaaaaacagcacgcaaatgttctaaatgctcctctatagacttgctgtaaataaggatatcatcgaaataaacaacaacaaacaaacctatgaaggcccgtagaactttgttcattaaacgcataaaggtgctgggagcattagtcaatccaaatggcataaccaaccattcatataaaccaaatttcgttttaaaagtcgttttccattcatcaccgagtttcattctaatctgatggtaaccgctacgcaaatcaaccttagagaaaataaaggcaccactaagctcatctaacatatcatcaaggcgtggaataggatatcgataacgaactatgatgttattaatagcacgacaatctacgcgcatacgccatgacccatctttctttggaacgagtaaaacaggaaccgagcaagggctaagagactcacgaatgtaacctttatcaagcagcatctgcacctggcgctggatctccttcgtctcatctggatttgtacggtacggggcgcggttcggaagagaagcgccggggatgagatcgatctgatgctcaatgccacggagtggaggaagaaccgatggtaagtccgtaggaaaaacatcagcatactcctgccaaaggttaaacaacagcaggggggtattcccaaagacggtgccacaaccaag

SEQ ID NO: 214 - DNA, 672 bp, Zea mays
  source (0)...(0): Zea mays BAC clone full insert sequence contig bacm2.pk170.a08.fis21
gtgatacggatgtggatgtgtgcgagtgggcaaggataatttctctaccaacgatgtacttgccaaattgttgcagctgccactatcgatgatgatgcgaatcgaccgttcgtgcacgacgcccttggtatggaatagagtgtgtcgctgatttttttcggcctgggcaacctgtgtgctgagaccacgctgcacaacaagactctcatacctatcggcgtcgatgggatcaacgtggacttcctcattttctgcatggttagtggcaatcatagcatgactagtttccttagaatcactggctgaagagtactcaccattgtcacgtataagcaaggtacgcttgtttgggcagtcccgaatcatgtgcccaaaccctctgcaacgatggcactgaatatcccgtgtacgtcctgtggaagaagcggcgcctttggcagggggcgccactggcttggtcgtccctgtgcgcgatgtagtgctaggcgtagaaggtgcagggctggaaggagttgagctgtgtgttggaccccggcctgcaaaagagttagtatatgtctttgatcgtcgtccctgcacttcacgttcagctttgcaagcatattcaaacaatgtgggtatatcaaaaataatcccttatatcaagtatatcctgaatttccctgtttcaac

SEQ ID NO: 215 - DNA, 1053 bp, Zea mays
  source (0)...(0): Zea mays BAC clone full insert sequence contig bacm2.pk170.a08.fis22
  misc_feature (1)...(1053): n = A,T,C or G
ctgtgtctccgctcgtgcaggctgagggctggaaaaacgcctggcatgcttccgcgcgtgcaggctgcgtccggatggcgcaggcaaccaatcacatgctcgttcatggtcaatgcacacaacgggcctgggtctggctatccgagcaaccaatcacacccaatgattacggcggcctcagtacagatatgactataattctggatccatatgaaagtagacttgataggctttccatgttgtgcttgaacattccaatccgagcccgcatgtgaccgtggtgaccgtcacaagttggtgttcttctgcagtccgaatccagcatgttcaaatccttttccctttcggtcttctccctggttcctaagcaaaacaagagtgcactccatggtctaaatatgatggacatgcattcaagagtgtaatcacctgatggttgagttgacgagcacgagcgcgagtaatgggaccagaaattggtacttgtattggcatagatgtatcagtagtgtggatgtcttcatcagttgccttctcaaattctagatggtttacctcccaaacaccttagcataataaagtaatcacaaggtattaatacctcatttaaggaatgattagcttcaacaacacggaacgagttcacctgatgattaaatttacgtgcacggactcgtttcactggtccatgattaaatggtgaagggggtcgctggtgtggttgtattgatggcagtgatgtcctcatcaaccacataaaagttcaggttagaccttataccagcacccttttgagcctcgcactttctttcaataatctgcattgttgaatttgtgtgctttcgcgtcatttgttgctggtcgcattgtgtttttttctcgccatccntttctttctccttgtttttctccctcggttacattcaaaccctagcgcggcgcaaccatctttccttggttttgtccttcgggtacatcaaaccctagcggggccgaaccatcttcccttggttctctcgttcgggttacacaaaccgagtcaacccgctttcc

SEQ ID NO: 216 - DNA, 1048 bp, Zea mays
  source (0)...(0): Zea mays BAC clone full insert sequence contig bacm2.pk170.a08.fis23
tttaaatacaatctggaaagcttatcttatcttctttccaacggatctgaccttgtctcaaaattcattctgagcgctccgcaatcatcgtagagatttctggactttctatattaacaagatttgttaaatctgatttaaaggggctgttagcaatatctttattgtttgggttgtcatagtgaaaaaaagggtttaggtccctgcaaaaaaaacagaagaagaagaaaaaaaaagaatagaaaagaaaaaaaaggaaaagaagaagaagggggctgaatctctaaatctgttgtttctctttgtgctgtgctagttgttcttttttagtgactacctttgtgcctaggctcacgtctctagcatggtttagcctaggaccagcacagtaccaccgttgaacgattattcagcttgcttttgtaactaacgtggtactagtgtattccttgcttcagcccacctacaactctacatatttcgactacagtttgacaggtcgtgttgctgcggcaccgatacacttattccacggttgcagacttgttggttgctgacccctcctgttgtgcaaggtaagaattggtaagagcttgtgaggcaggttgagagtgagcgccttgcagtagctacatcctaatagttgtagagtttttattccttcacattttttttcttgttgcctctgttcatctaaccatggcaggattggaggttgatgatgcttctcgtaatatgccacactctcctcgcaccaagggtatcatacaacactttgtaaggctggtgaaaacgcacacggaaggtcttgataatgacatgcaggtgacgaatgaaaagatggggcaattggaggccacacagatcgacacaaacaccaaacttgcaaatgtggaaatgacagttgctcatattgacaagagccttgtcgcactcttgaggcgatttgatgagatgcatgctaataccaatggtgggcgtgatgagggcgccgaaggtaactgggatgactatgttgctgatactgaacaagatgaccaagaagcac

SEQ ID NO: 217 - DNA, 1314 bp, Zea mays
  source (0)...(0): Zea mays BAC clone full insert sequence contig bacm2.pk170.a08.fis24
  misc_feature (1)...(1340): n = A,T,C or G
tttgtgtgcaccccaacacccgttttcggaatgtgtgacgtgcgacaacgaaattgcgcgaaaccaccccaaacatgagttttggacctaaagtactggattgggcatgttcgttgcgaaaaacgaagaaatggttccggtggcaaaaactcgtgctttgtatgcacctgacacccgttttcggaatgggtgacgtgcgacaacgaaattgcgcgaaaccaccccaaacatgagttttggacctaaagtagtggattgggcacgttcgttgcgaaaaacgaagaaatggttccgctggcaaaaactcgtgctttgtgtgcaccccgacacccgttttcgaaatgggtgacgtgcgacaacgaaattgcgcgaaaccaccccaaacatgagttttggacctaaagtagtggattgggcatgttcgttgcgaaaaacgaaaaaatggttccgctcgcaaaaactcgtgctttgtatgcacctgacacccgttttcggaatgngtgacgtgcgacaacaaaattgcgcgaaaccacctcaaacatgagttttggacctaaagtagtggattgggcatgttcgttgcgaaaaacgaagaaatggttccactggcaaaaactcgtgctttgtatgcaccccgacacccgttttcggaatgggtgacgtgcgacaacgaaattgagcgaaaccaccccaaacatgagttttggacctaaagtagtggattgggcatgttcgttgcgaaaaacgaagaaatggttccgctgacaaaaactcgtgctttgtatgcacccccgacaacctgttttcgaaaatgtgtgacgtgcgacaacgaaattgcgcgaaaccaccccaaacatgagttttgcacctaaagtagtggattgggcatattctttgcgaaaaacgaagaaatggttccggtggcaaaaactcgtgctttgtatgcacccgacacccgttttcggaatgggtgacgtgcgacaacgaaattgcgcgaaaccaccccaaacatgtgttttggacctaaagtactggattgggcatgttcgttgcgaaaaacgaagaaatgcttccggtggcaaaaactcgtgctttgtatgcacctgacacccgttttcggaatgggtgacgtgcgacaacgaaattgcgcgaaaccaccccaaacatgagttttggacctaaagtagtggattgggcacgttcgttgcgaaaaacgaagaaatggttctgctcgcaaaaactcgtgctttgtgtgcaccccgacacccgttttcgaaatgggtgacgtgcgacaacgaaattgcgcgaaaccac

SEQ ID NO: 218 - DNA, 936 bp, Zea mays
  source (0)...(0): Zea mays BAC clone full insert sequence contig bacm2.pk170.a08.fis25
tcgtaccagcttggttaccttgaccttaccactattgttgagccattgaatgtgatatggatgcgggtgtggtttggtcgtaagtgcaagcttctccaccatgtcgctgctagccaagttgttgcagctacctccatcaatgatcaaacgacatgaacgctccttaatgacacactttgtttgaaacaacgtatgtcgctgattctgctctgccttctccatttgtgcactaagcacacgctgtacaatgaggctctcataatgctctgcatcatctgcaccaatctgttcttcgggtggttccttagtgcctgcatcatcagccgcaagcaaagcaagtgtagcttcatccaaatcactagcagaggaatacccaccatcgtcttttaccaccaaaacacgctgattaggacaatcacgctgcacgtgtctatagcccttgcatcgataacacagaacatctcttgttctacccgtggaggctactgaagaggcactacctgctggtttctgggcagatttggttgctgaatttgtggaaaatgcacgtggtttgtcgccggaggaaggcgggggtgctggtcgacttggcgagggagttggtgctggtgtacggccggtcatggacgtagtcgtgcgctgttgccatggtgtagattttcctgcagaaacattagaccttgcactagcacgtcgtccctgcacttccctttcagctttgcaagcaagatgaaacaatcgggttacattagcataatctttataagcaaggatgtcctgaatttccctatttaaccctgccaaaaatctagccatagcagattcctcaccctcctctatgttacaacgcagcatacccattttgtattcccctgatatattcttctacacttttagtacccctgtctcatttgtgcaacttgttttaacatatca

SEQ ID NO: 219 - DNA, 1427 bp, Zea mays
  source (0)...(0): Zea mays BAC clone full insert sequence contig bacm2.pk170.a08.fis26
gtaacctccatgaccaaactcaacaaaacatggctgctgctaatgctaaatatcagattactggcagtaaaggccggaaactagttacttttgaaccctggtgatatggtttggtcgcatttgagaaaggatcgtttccctcctttgcgtcgttctaaattgatgcctcgtgctactggtccttttaagatactaaccaagattaatgcaaaacatcaggttgctggtagtaaaggaagaaaacttgttacttttgagccaggtgatatggtttggttgcacttgagaaaggatcggtttcctattgtgcgtcgttctaaattaatgcctcgtgctgctggtccttttaaagtgctaacaaagattaatgataatgcttatatctttgacctgcatgcggaatttggtgtttccactagttttaatgttgcagatttgaaaccatataatggccgaggatgaggagttgccgtcgaggacgacttcacttcaagatggggaggatgatgaggacatcactatgagtacgactacaccaacaacacctccacatcaagcgccacttccttcattagctgggccaatcactcgggcccgtgccagagatcttaacttcgtcatgctactgaagaatgagggcccagaagaatagacgaccagcccaactgcggcccatagtggacgacctagggttggccgcccctaggggctgcgccctctctatttatccaggagttgtgcctcctttattttcgagttttgttttacgttagccttagctactctcgaacacgcgcaaatctgcgctgtcttcgtatattcagaactccaccctcgagtaatagattagattgctcgcatctttttcttgttcgttcttcgattgcgcacaggaaacgatcttcgtgatcaggccgatctcgcatcagcaaggtcggtaaccacagggagttggttcagcgattgcattggcgcctcgggcttgctcgtcgtagtcggatcgcaagggtcatcttccgccaaatcggaattatctttactcgccgaaagatcgggcacctcagctacatcaaagtgattcgcaggaggaagcgttcggcactttgaaagataagttaatccaagctcccatattgcaattgcctgattttaataaagtgtttgagcttgaatgcgatgctagctgtattgggctaggtgctgttttgttacaagaaggaaaaccagttgcttattttagtgaaaaattaagcggtgctagtctgaaatattctacttatgataaggagctttacgctttagtgcgcactttgcatacatggcagcactatctttggcatcgtgagttcataattcattctgatcatgaggctttaaaacatattcgtacccaaacaaatctgaaccgtcgtcatgctaaatgggaa

SEQ ID NO: 220 - DNA, 1214 bp, Zea mays
  source (0)...(0): Zea mays BAC clone full insert sequence contig bacm2.pk170.a08.fis27
tagtttgttgctccttttgctaagaaaatatcaaaaaaatcatacaaaaaagaaaaacaaaatcacctgtgattcctactagtgcctttttggcctcgctagtacaatatttacggtactgccattctgctagttccatccgtcctttgcacttgtggccagcaatatagtttcatgttttgcactataattcaactttgcattattgtttgatcgtgctaatccttgacttgagtgcagcctacccaaaactccacatatttctacgacgagaaggtttttgtttctccaggcaatcgctcatccaatctttcaccggttccacctgttggttgcagttcaccactgtggcttggtaagaacggctaagaatttgataacagcatttcattgagcgagttgtcaccaccatttccctgttgtcgtcggtttttctccttttggtgttttggtgtttgcgctaactatggcaggagcacacgacacggtggatgcccagttgctggaagtaaggggacaagttgatggacttgctgctaacattagaacgatgcatgaacggcttgattcaacggtcacttcgacgaccgagcgtttcaaccagcttgaccttgctcaaacggcgactcgcaccacctcgacaccatcctggcacgccttgatgcgttgaccacaaagatggagcaggactacggcggtgacactgagtaggacgatggagatcgccgtggtcgtgcacgccgtgtggttcgtcatccccctaatgacttattttctaagattaaatttaaaattccaccttttaatggcaaatatgatcctgctgcatatcttgattgggagttagaggttgaacaaaaattttcatgccatgatattgctgcacattctcaggttaaagttgctattagtgaatttactgattttgctttaatttggtggcgtgagtataaaatgaaacattccactgccattccaaccacttgggatcagttgaaagctgcgatgcgacatcgatttgtgccttcgtattatgctcgtgatttgcttaataaaatgcagcgttttcagcaaggttctcaatctgttgaggactatttccaggagttacaaaaaggtatgattcgttgtgggatattggaggacaacggcgctgctatggcacgttttcgtggtggtttaaaccgcgaaatctaggatatacttgattataa

SEQ ID NO: 221 - DNA, 1214 bp, Zea mays
  source (0)...(0): Zea mays BAC clone full insert sequence contig bacm2.pk170.a08.fis28
aacaattctataaagggcctcagaacttcattcatcactcgcataaaagtgctgggagcattagtcaatccaaacggcataaccaaccattcatataaaccaaatttcgttttaaaagccgttttccattcatcacccagtttcattctaatctggtggtaaccactacgcaaatcaatcttagtgaaaataatggcaccactaagctcatctaacatagcatcaaggtgtggtataggatatcgataacgaatagtgatgttattaatagcacgacagtctacacacatacgctatgacccatcttttttgggaacaagtaacacatgaacagagcaagggctaagagactcacgaatgtatcccttgtcaagcaacgcctgtacctggcgctgaatctccttcgtctcatccggatttgtacggtacggtgcgcggttcggaagctgtgcgccggggacgaggtcgatctggtgctcaatgccacgaagtggtgggagacccggtggtaagtctttgggaaagacatcagcgtactcctgcaaaaggttagcaaccatagggggaatagccaaagattgtgcatcatcaagtgaaatgaggacactagagcatacaagtgcatagcatggcaaatgagcaccgtgtagatcatcaaaatcagcacgtgtagcaagtaaaataggagccttcaacttgatttcagaaggaacagagggcgatggatcaagttgtttagcagttatagcagctcgggcaagatcatctttaataatttgttcaggtgtcattggatgtataattattttctgacccttaaaaatgaaagaataatgattcgaacgaccatgatgcaagctatcagtatcatattgccaaggtcgaccaagtaacaaagagcatgcttccatgggaataacatcacaatcaacaaaatcagaataagcacccatggagaaaggaacacgcacggaacgcgtgatttttattttaccaccatcattaagccattgaatgtgatatgggtttggatgcttacgagtgggtaacgacaactttttgaccaacatggtactcgccaaattgttgcaactgccgctgtcgataatgatgcgaattgaccgctcctgcacaacaccctttgtatggaacagtgtgtcgctgattcttctcgggcaaagcgacatgtgtattaagaacacgctgcacaacaa

SEQ ID NO: 222 - DNA, 1485 bp, Zea mays
  source (0)...(0): Zea mays BAC clone full insert sequence contig bacm2.pk170.a08.fis29
ctgttttcagaatgggtgacgtgcgacaacgaaattgcgcgaaaccacctcaaacatgagttttggacctaaagtagtggactgggcatgttcgttgcgaaaaacgaagaaatggttccggtggtaaaaactcgtgctttgtatgcaccccgacacccgttttcgaaatgggtgacgtgcgacaacgaaattgcgcgaaaccacaccaaacatgagttttggacctaaagtagtggattgggcatgttcgttgcgaaaaacgaagaaatggttccggtggcaaaaactcgtgctttgtatgcacccgacacccgttttcggaatgggtgacgtgcgataacgaaattgcgcgaaaccaccccaaacatgagttttggacctaaagtagtggattgggcatgttcgttgcgaaaaacgaagaaatagttccggtggcaaaaactcgtgcttttatgcacctcgatacctgttttcagaatgggtgacgtgcgacaacgaaattgcgcgaaaccacctcaaacatgagttttggatctaaagtagtggattgggcatgttcgttgcgaaaaacgaagaaatggttccgctggcaaaaactcgtgctttgtatgcaccccgacacccgttttcggaatgggtgacgtgcgacaacgaaattgagcgaaaccaccccaaacatgagttttggacctaaagtagtggattgggcatgttcgttgcgaaaaacgaagaaatggttccggtggcaaaaactcgtgctttgtgcacccgacacccgttttcggaatgggtgacgtgcgacaacgaaattgcgcgaaaccaccccaaacatgagttttggacctaaagtagtggattgggcatgttcgttgcgaaaaacgaagaaatggttccgatggaaaaaactcatgcttttatgcacctcgatacctgtttactgaatgggtgacgtgcgacaacgaaattgcgcgaaaccaccccaaacatgagttttggacctcaactagtggattgggcatgttcgttgcgaaaaacgaagaaatggttccggtggcaaaaactcgtgctttgtatgcacctgacacccgttttcggaatgggtgacgtgcgacaacgaaattgcgcgaaaccaccccaaacatgagttttggacctaaagtagtggattgggcacgttcgttgcgaaaaacgaagaaatggttccgctggcaaaaactcgtgctttgtgtgcaccccgacacccgttttcgaaatgggtgacgtgcgacaacgaaattgcgcgaaaccaccccaaacatgagttttggacctaaagtagtggattgggcatgttcgttgcgaaaaacgaaaaaatggttccgctcgcaaaaactcgtgctttgtatgcacctgacacccgttttcggaatgggtgacgtgcggcaacgaaattgcgcaaaaccaccccaaacatgagttttggacctaaagtagtatctagcgtga

SEQ ID NO: 223 - DNA, 1422 bp, Zea mays
  source (0)...(0): Zea mays BAC clone full insert sequence contig bacm2.pk170.a08.fis30
tgagaagcatcatcaacctccaatcctgccatggttagacgaacagaggcaacaagaaaaaaaatgtgaatgaataaaaactctacaactattaggatgtagctactgcaaggcgctcactctcaacctgtcacacaagctcttaccaattcttaccttgcacaacaggaggggtcagcaaccaacaagtctgcaaccgtggaataagtgtatcggtgccgcagcaacacgacctgtcaaactgtagtcgaaatatgtagagttgtaggtgggctgaagcaaggaatacactagtaccacgttagttacaaaagcaagctgaataatcgttcaacggtggtactgtgctagtcctaggctaaaccatgctagagacgtgagcctaggcacaaaggtagtcactgaaaaagaacaactagcacagcacaaagagaaacaacagatttagagattcagcccccttctttctttttcctttttttttcttttcttttcttttttttttcttcttttatttgcaggggcctgaaccctttttttcactatgacaacccaaacaataaggatattgctaacaacccctttaaatcagatttaacaaatcttgttaatatagaaagtccagaaatctccacgatgattgcggagcgctcagaatgaattttgagataaggtcagatccgttggaaagaagataagataagctttccagattgtatttaaacttccaaatcggacatgagatgtatccgtggtggaaaaaacgaaacagagatgtttatggtgatggtggatctcgtggtgaccaaaacgtggtagaactcaaaactctaaaggaataaactaagaccagcaactcgacacaaccgatgcaaccaaaaactcaacaagccctagctaagtagtactagtaaatgctcaatggtttataggattgctgtaaaactaatctactatttttttggctttttctggactataggagataagaaaacagcgaagaaaagtaaatctctcaccgataaaccttgctctgattaccaactgatgtgcacccgttgggtgattgcccgatctttcgatgagagggtgtggaataactcgattgggggaggagacgacgttcacggcccgactacagccttccaaagacgctgcgcctcagcaaccgatacaccacctcctatggctgtcacgatcttgtggagcgtgacaccctggccactagggcactcgtccctgcagcaatcgaagaactagcaagaaacagtagaaacagtactgaattaccagatctaaatgtagggttaaaaatcaaactccaatatggtggggttccgaagacagaagacgggcggctgaactagcacgcgcgcttgccagcaagtagcgagagctaaacttgatctaacaaaactcgct

SEQ ID NO: 224 - DNA, 1416 bp, Zea mays
  source (0)...(0): Zea mays BAC clone full insert sequence contig bacm2.pk170.a08.fis31
gttgtcgcacgtcacccattatgaaaacgggtgttgggtgcatacaaagcacgagtttttgccaccggaaccattttttcgtttttcgctacgaacatgcccaatccactactttaggtccaaaactcatgtttggggtggtttcgcgcaatttcgttgtcgcacgtcacctatttcgaaaacgggtgtcggagtgcatacaaagcacgagtttttgccaccggaaccatttcttcgttttttgcaacgaacatgcccaatccactactttaggtccaaaactcatgtttggggtggtttcgcgcaatttcgttgcctcacgtcacccattccgaaaacgggtgtcgggtgcatacaaagcacgagtttttgccaccggaaccatttcgtcgtttttcgcaacgaacatgcccaatccactactttaggtccaaaactcatgtttggggtggtctcgcgcaatttcgttgtcgcacgtacccattccgaaaacgggtgtcggggtgcatacaaagcacgagtttttaccagcggaaccatttcttcgtttttcgcaacgaacatgcccaatccactactttaggtccaaaactcatgtttgaggtggtttcgcgcaatttcgttgtcgcacgtcacccattctgaaaacaggtatcgaggtgcataaaagcacgagtttttgccaccggaaccatttcttcgtttttcgcaacgaacatgcccaatccactactttaggtccaaaactcatgtttggggtggtttcgcgcaatttcgttgtcgcacgtcacccattccgaaaacgggtgtcgggtgcatacaaagcacgagtttttgccaccggaaccatttcttcgtttttcgcaacgaacatgcccaatctactactttaggtccaaaactcatgtttggggtggtttcgcgcaatttcgttgtcgcacgtcacccatttcgaaaacgggtgtcggggtgcatacaaagcacgagtttttaccaccggaaccatttcttcgtttttcgcaacgaacatgcccagtccactactttaggtccaaaactcatgtttgaggtggtttcgcgcaatttcgttgtcgcacgtcacccattctgaaaacaggtatcgaggtgcataaaagcacgagtttttgccaccggaaccatttcttcgtttttcgcaacgaacatgcccaatccactactttaggtccaaaactcatgtttggggtggtttcgcgcaatttcgttgccgcacgtcacccattccgaaaacgggtgttaggtgcatacaaagcacgagtttttgccaccggaaccatttcttcgtttttcgcaacgaacatgcccatatccactactttaggtccaaaactcatgtttggggtggtttcgcgcaatttaatcctctatctaacgtca

SEQ ID NO: 225 - DNA, 1911 bp, Zea mays
  source (0)...(0): Zea mays BAC clone full insert sequence contig bacm2.pk170.a08.fis32
gtagtcgaaatatgtagagttgtaggtgggctgaagcaaggaatacactagtaccatgttagttacaaaagcaagctgaataatcgttcaacggtggtactgtgctggtcctaggctaaaccaggctagagacgtgagcctaggcacaaaggtagtcactgaaaaagaacaactagcacagcacaaagagaaacaacagatttagagattcagcccccttcttcttcttttcctttttttttcttttctattctttttttttcttcttcttctgttttttttgcaggggcctaaaccctttttttcactatgacaacccaaacaataaagatattgctaacagccccttaaaatcagacttaacaaatcttgttaatatagaaagtccagaaatctctatgatgattgcggagcgctcagaacgaattttgagataaggtcagatccgttggaaataagataagataagctttccagattgtatttaaacttccaaatcggatatgatatgtatccgtggtggcaaaaacgaaccagagatgtttttggtgatggtggatctcgtggtgaccaaaacgtggtagaactcaaaactctaaaggaataaactaagaccagcaactcgacacaaccgatgcaaccaaaaactcaacaagccctaactaagtagtactagtaaatgctcaatggtttataggattgcggtaaaactaatctactatttttttggctttttctggactataggagataagaaaacagcgaagaaaagtaaatctctcaccgataaaccttgctctgattaccaactgatgtgcacccgttgggtgattgcccgatctttcgatgagagggtgtggaataactcgattgggggaggagacgacgttcacggcccgactacagccttccaaagacgctgcgccttagcaaccgatacaccacctcctatggctgtcacgatcttgtggagcgtgacaccctggccactagggcactcgtcctgcaagcaatcgaagaactagcaagaacaagtagaacaagtactgaattaccagatctaaatgtaggtttaaaaatcaaactccaatatggtggggttccgaagacaagaagacgggcggctgaactagcacgcgcgcttgcaagcaagtagcgagagctaaacttgatctaaacaaaacccgctgttcttggtggcggctagggggtttataaacatgggaggacgaccacaagggtattggggtcgtgctgcaaccctaggatgcgtccctaatggacctaacttgatacacgacccattgggccaaaatagggtgacgcagcaccatgggcagaaaaggcaggaaatgtctcggtaagaaaacaatgattacggcggcctcagaacagatatgactataattccggatccatatgaaagtagacttgataagctttccatgttgtgcttgaacattccaatccgagcccgcatctgaccgtggtgaccgtcacaagttggtgttcttctgcagtccgaatccagcatgttcaaatccttttccctttcggtcttctccctggttcctaagcaaaacaagagtgcacgggtgtccatggtctaaatatgatggacatgaactcaagagtgtaatcacctgatggttgagttgacgagcacgagcacgagtaatgggaccagaaattggtacttgtattggcatagatgtatcagtagtgtggatgtcttcatcagagtcaagaagttctctcgacagtttctggacgcctcatttggtatctctaattgattctttctccaccaaaaaggagacgaagagtgctttccatcaagtgcttatttgccttcattggccttgggagttgaaagatatggcctcttcaacttgcacttgctgcagttac

SEQ ID NO: 226 - DNA, 2144 bp, Zea mays
  source (0)...(0): Zea mays BAC clone full insert sequence contig bacm2.pk170.a08.fis33
  misc_feature (1)...(2144): n = A,T,C or G
taaaaagcacgagtttttgccaccggaaccatttcttcgtttttcgcaatgaacatgcccaatccactactttaggtccaaaactcatgtttggggtggtttcgcacaatttcgttgccgcacgtcacccattccgtaaacgagtgttggggtgcatacaagcatgagtttttgccacttgaaccatttcttcgtttttcgcaacgaacatgcccaatcagtactttaggtctaaaactcatgtttggggtcgttgcgcacaatttcgttgccgcatgtcactcattccgaaaacgggtgtcggggtgcatacaaagcacacgtttttgccaccggaactatntctttgtttttttctcaacgaacatgcccaatccactactttaggtccaaaactcatgtttggggtggtttcgcacaatttcgttgccgcacgtcacccattccgtaaacgagtgttggggtgcatacaagcatgagtttttgccacttgaaccatttcttcgtttttcgcaacgaacatgcccaatcagtactttaggtctaaaactcatgtttggggtcgttgcgcacaatttcgttgccgcatgtcacccattccgaaaacgggtgtcggggtgcatacaaagcacacgtttttgccaccggaactatttctttgtttttttctcaacgaacatgcccaatccactactttaggtccaaaaacaagtttggggtgctttcgtgcaatttcgttgcgacacatcaccaattccgaaaacgggtgtcgagatgcaaacaagcacgagttcttgccactggaaccatttctttgctttttcgcaacgaacatgcccaatccacaactttaggtccaaaactcacgtttggggtggtttcacgcaatttcgttgccgcacgtcacccacttcgaaaataggtttcagggtgcattcaaagcacgggtttttgccaccggaaccatttcttcgtttttcgcaacgaacatgcccaaaccactactttaggtcaaaaactcatgtttgggtggtttcgcgcaatatcgttgccgcacgtcacccgttccgaaaacgggtgtcgaggtgcatacaagcacgagtttttgccaccggaactatttcttcgtttttcgcaacgaacatgcccaatccactactttaggtccaaaactcatgtttggggtattttcgctcaattttgttgctgcaggtcactcattccaaaaacgggtgtcggggtgcattcaaagcacgagtttttgccaccagaaccatttcttcgtttttcgcaacgaacatgcccaatccactactttaggtccaaaactcatgtttgggtggtttcgcacaatttcgttgtcgcacgtcacccattccgaaaacgggtgtcggggtgcatacaaagcacgagtttttgctaccttaactgatagagctggagtgcccgatctttcggtgagtggagataattttgatttggtggaagtagacccttgcgatccgactacgacgagcaagcccgaggcgccaatgcaatcgctgaaccaatccctgtggttaccgaccttgctgatgcgagatcggcctaatcacgaagatcgtttcctgtgcgcaatcgaagaacgaacaagaacaagatgcgagcaatctaatctattactcgagggtggagttctgaatacacgaagacagcgcagatttgcgcgtgttcgagagtagctaaggctaacgtaaaacaaaactcgagaataaaggaggcgcagctcctggataaatagagggggcgcagcccctaggggcggccaaccctaggtcgtccactatgggccgcagttgggctggtcgtctattcttctgggccctcattcttcagtagcatgacgaagttaagatctctggcacgggcccgagtgattggcccagctaatgaaggaagtggcgcttgatgtggaggtgctgctggtgtagtcgtactcatagtgatgtcctcatcatccactactttaggtccaaaactcatgtttggggtggtttcgcgcaatttcgttgtcacacgttacccatttcaaaaatgggtgtcggggtgcatacaaagcacgagtttttaccagcgaaaccatttcttcgtttttcgcaacgaac

SEQ ID NO: 227 - DNA, 1403 bp, Zea mays
  source (0)...(0): Zea mays BAC clone full insert sequence contig bacm2.pk170.a08.fis34
ctttaatcgtctctaatccaaagattttgtagtcaagttgattcagcaaagtatatctcctagacaaagcgtcagcaatgatattctcttttcctttcttgtgcttaataacataaggaaacgattcgataaattcaacccacttagcatgtctacggttcagttttccttgactacgaatatgtttcaaaggttcatgatcagaatgaataacaaactctttgggccacaaataatgctgccatgtttctaatgttcgcacaagagcatataatttcttatcataagtagaataatttagaacagacccactcaatttttcactaaaatatgcaacaggtttgccttcttgtaacaaaacaccacccaatccaattccactagcatcacattcaagctcaaaagtcttattaaaatcaggaagttggaggagaggtgcatgtgtcaacttatctttcagcacgttgaaagcgtgctcttgtactttgccccaactaaaatgcactcccttcttcgtaagctcattcaaaggtgcagcaatggtgctaaagtccttcacaaaacggcgatagaagccagcaagtcctaggaaactccgcacctgtgtgatagtctttggcataggccatccatgtatcgcttctaccttggcttgatcaacctcaattccctgtggagtcacaacataaccaagaaacgaaactcgatcggtgcaaaatgtgcacttctcaaggttaccaaataaacgtgcatctcgtaaagcattaaaaacagcacgcatgtgatcaacatgttcatccatagatttgctgtagatcaatatgtcatcaaagtatactaccacaaattttccaatgaaggcacgcaaaacctcgttcattaatctcatgaaagtgctaggtgcattagttaacccaaaaggcatgactaaccactcatacaatccgaacttagttttgaaagcagttttccattcatctcccaatttcatacgaatctggtggtacccactacgcaaatcaactttagaaaagacaatgacaccactcaattcatcaagcatatcatctaaacgtggaatagggtgtcgataacgtatcgtgatattattaatagccctacaatcaacacacatacgccatgttccatcttttttaggcactaaaataaccggaacagcacacggactaagagactcacgcacgtaacctttgtcgagtagttcttgcacttgtcgctgaatttcttttgtttcctctggatttgtcctatatggcgcacgattcggcaaagatgcaccaggaatgagatcaatttgctgctcgatcactcgtataggtagcagcccctctagtatctcacttggaaatacatcagactactcctgcacaatgttagtaata

SEQ ID NO: 228 - DNA, 2103 bp, Zea mays
  source (0)...(0): Zea mays BAC clone full insert sequence contig bacm2.pk170.a08.fis35
  misc_feature (1)...(2103): n = A,T,C or G
cttgctttaaccggatgaaatcttcttgtttcatatggagcactccctcaggaacataatgctcccggaatgcttgcttgaattcctcccaggtgatctgatgtcgagccggttgaattgctacaaaatttgcccaccaagtactggcagtccctcttagttgatgtgcagcgaacagtgacttctgcgtctccgtgcaacatcatgtgcgcgagtcaccccaccatcatgtgcgcgagtccgtgatggcatctgaggcaaagaaacatttgggaaaatataacatgctagcacataccatcatattacattaccaaaatgtaataattatacagactccagcgtacaacttgacttcagtacttattttacataattataacatctaaactatgctattctagtcttcgtcatccttagttgcttcatttcctgctgcaggagaccgttcatcaggaaggttcatggaaggagggggccgaaaaaggtccaactcctcatcaggtccttcatttgctgttcctgaaggtccggctgccattgcaacagcgtcggaaggcacgtccgggtgcagtcgagcatacagtacatgtacttcttcatgtaaagtattacagtacactcgcaagctgtcgagggccgcactaagctctgccacacgagctcgagcttttgcttcgcggtcccaagcgatcgaacgtgagttgacggcccaatcaatggccgaatcccgttctgatatctcatattgcaagcagctgacgtcagctgacaattcagctatgcgttggctgtcctgcgcccatgccctattctggtgacgtagctctgaccgaagtggttccaccttggcctccaagtctccaatcgggttagtgttgccactactactcccttcatgtctggggctagctgatggcgaggcacgccaaaaggtccagtagacttgcgtgcagttttgcttgtacgcgccatgtctccataagatgggaagatttattagtagattcttaacatgatgcatgcataacctaatcaatatggaatcaaccttcattgatccccaacttcctatacattgcactctgttaccctgtccttacaagataagggacttccagaaagtggtaataaatgaaagaatatttctagataagggtttaaaaattcctttgaagtactacgtaatatctgagaagatgggcttcgctccgataccagctgtgacggaacctcccaaggtattaggcccacctacagttgtccttgtcctaaggaccttggacaaccttgtagatgcaaataatcactcgacaagttcggtactgtatcttcatcattctgcccaagagcgcttcacccgtcatgcagatattacatcacgtcggaggaaagaataagcggaagcaaattaaaataacttaatttacattgatccaatatagagagagtattattattacaatactagggtactatgagtgcataaaatattattattacagacccgggaggcaaaacaccctcccgcacacaagtttattgtttttaaagtgggaggccaacatcctcccgtgacttcactgctggggctcttccttgggtaccacctttgaacaaaaacagcaaaagtctgttgtttcctcacctacaacaacatgggttcgaaaaccatgagtacggagtgtactttttcaagtcttacccgataaaagaaaagactctcaaggatatgctggcttgagggagtcaaggtaaggctattcaaagaatcaaagactctatttgcagaaatgcttactgatagtggatccttaaaaatccagttttattatcaagttaagtcattacctgtagctagagttctttctaccctagttcaagcacttggcctacactagccatcttttatcatccctttttactttactggattgctacgtgtaagtcagtgaccaagtcttcatgtccgagaagtaacggcgatccaaatcgattaatactcagctgaggatctccaatcacacgacatatgtagcacttaacccttggatatgtcaatttgccaccgggtttcttaagacctgaccggttcacngccac

SEQ ID NO: 229 - DNA, 1585 bp, Zea mays
  source (0)...(0): Zea mays BAC clone full insert sequence contig bacm2.pk170.a08.fis36
gaaattgcgcgaaaccaccccaaacatgagttttggacctaaagtagtggattgggcatgttcgttgcaaaaaacgaagaaatggttccggtggcaaaaactcgtgctttgtgtgcaccccgacaacccgttttcggaatgtgtgacgtgcgacaacgaaattgcgcgaaaccaccccaaacatgagttttggacctaaagtagtggattgggcatgttcgttgcgaaaaacgaagaaatggttccggttgcaaaaactcgttctttgtatgcacccgacacccgttttcggaatgggtgacgagcgacaacgaaattgcgcgaaaccaccccaaacatgagttttggacctaaagtagtggattgggtgatgaagacatccacactactgatacatctatgccaatacaagtaccaatttctggtcccattactcgcgctcgtgctcgtcaactcaaccatcaggtgattacactcttgagttcatgtccatcttatttagaccatggagacccgtgcactcttgttttgcttaggaaccagggagaagaccgaaagggaaaaggatttgaacatgctggattcggactgcagaagaacaccaacttgtgacggtcaccacggtcggctcggattggaatgttcaagcacaacatggaaagcttatcaagtctactttcatatggatccggaattatagtcatatctgttctgaggccgccgtaatcattgttttcttaccgagatattttctgccttttctgcccatggtgctgcgtcaccctattttggccaatgggtcgtgtatcaagttaggtccattagggacgcatcctagggttgcagcacgaccccaatacccttgtggtcgtcctcccatgtttatagaccccctagccgccaccaagaacagcgagttttgtttagatcaagtttagctctcgctacttgcttgcaagcgcgcgtgctagttcagccgcccgtcttcttgtcttcggaaccccaccatattggagtttgactttgaaacctacatttagatctggtaattcagtacttgttctacttgttcttgctagttcttcgattgcttgcaggacgagtgccctagtggccagggtgtcacgctccacaagatcgtgacagccataggaggtggtgtatcggttgctaaggcgcagcgtctttggaaggctgtagtcgggccgtgaacgtcgtctcctcccccaatcgagttattccacaccctctcatcgaaagatcgggcaatcacccaacgggtgcacatcagttggtaatcagagcaaggtttatcggtgagagatttacttttcttcgctgttttcttatctcctatagtccagaaaaagccaaaaaaatagtagattagttttaccgcaatcctataaaccattgagcatttactagtactacttagctagggcttgttgagtttttggttgcatcggttgtgtcgagttgctggtcttagtttattcctttagagttttgagttctaccacgttttggtcaccacgagatccaccatcaccataaacatctctggttcgtttttgctaccacg

SEQ ID NO: 230 - DNA, 1890 bp, Zea mays
  source (0)...(0): Zea mays BAC clone full insert sequence contig bacm2.pk170.a08.fis37
ttcttctcacacagaccaatcaacggtatctatcaccttgatggcaaagaatgctgcatatcttgaattgaaatcaaagcatccttgcataccaaggcgtaggcaacagtagtggaagcaaataattcattaacatcagtttttgtcgcaagcaagcaatgtcctttcaattttatcccatctttgttattaccaactgctttaatattcttgttgttctcagttttagctttggtagctttagcaacatcatcacgcacaatagcctcaggggacatgggaagcaaaataattttcttatcatggtgtatgagagaatattgatttgatctaccatgatgcatacaatctgaatcaaattgccatggtctacctagcagaatattacaagcatccataggcacaacatcacagtcaacaacatcacgatatgaaccaatagcaaaattaattcgtaccagcttggttaccttgaccttaccactattgttaagccattgaatgtgatatggatgcgggtgcggtttggtcgtaagtgcaagcttctccaccatgtcgctgctagccaagttgttgcagctacctccatcaatgatcaaacgacatgaacgctccttaatgacacactttgtttgaaacaacgtatgtcgctgattctgctctgccttctccatttgtgcactaagcacacgctgtacaatgaggctctcataatgctctgcatcatctgcaccaatctgttcttcgggtggttccttagtgcctgcatcatcagccgcaagcaaagcaagtgtagcttcatccaaatcactagcagaggaatacccaccatcgtcttttaccaccaaaacacgctgattaggacaatcacgctgcacgtgtccatagcccttgcatcgataacacagaacatctcttgttctacccgtggaggctactgaagaggcaatacctgctggtttctgggcagatttggttgctgaatttgtggaagatgcacgtggtttgtcgccggaggaaggcgggggtgctggtcgacttggcgagggagttggtgctggtgtacgaccggtcacggacgtagtcgtgcgctgttgccatggtgtagattttcctgcagaaacattagaccttgcactagcacgtcgtccctgcacttccctttcagctttgcaagcaagatgaaacaatcgggttacattagcataatctttataagcaaggatgtcctgaatttccctatttaacctgcccaaaaatctagccatagcagattcctcaccctcctctatgttacaacgcagcatacccatttgtaattcctgataatattcttctacacttttagtaccctgtctcaattgttgcaacttgtttaacatatcacgtgcataataagaaggaacaaatctagcccgcatgacccgtttcaacgcatcccaagtttgtggcatgttattaggattcttcttaccatgttctatccaccaaacagaagcaaattcagtaaactcactagtagaagctctaacccgcgcattctcaggaaattcatggcatgcaaacttttgatcaaccgcaatctcccaagtaatgtaagcatcagggtcatatttaccatcaaaaggaggtattttaaatttaaccttactaaaagcatcatcattaccatgtacctcacgtcggcgaaaaccacccatacctctacggttagtacgtagtcaccggcgattaggtgcttcttggtcatcttgttcagtatcagcaacatagtcatcccagttaccttcggcgccctcatcacgcccaccattggtattatcatgcatctcatcaaatcgcctcaagagtgcgaccaggctcttgtcaatatgagcaactgtcatttcc

SEQ ID NO: 231 - DNA, 1748 bp, Zea mays
  source (0)...(0): Zea mays BAC clone full insert sequence contig bacm2.pk170.a08.fis38
gaaagtgctaggtgcattagttaacccaaaaggcatgactaaccactcagacaatccgaacttagttttgaaagcagttttccattcatctcccaatttcatacgaatctggtggtacccactacgcaaatcaactttagaaaagacaatggcaccactcaattcatcaagcatatcatctaaacgtggaatagggtgtcgataacgtatcgtgatattattaatagccctacaatcaacacacatacgccatgttccatcttttttaggcactaaaataaccggaacagcacacggactaagagactcacgcacgtaacctttgtcgagtagttcttgcacttgtcgctgaatttcttttgtttcctctggatttgtcctatatggcgcacgattcggcaaagatgcaccaggaataagatcaatttggtgctcaatccctcgtataggtggcagcccctctggtatctcacttggaaatacatcagaatactcctgcaaaatgttagtaataacaggaggcaaagaatgctgcatatcttgaattgaaatcaaagcatccttgcataccaaggcgtaggcaacagtagtggaagcaaataattcattaacatcagtttttgtagcaagcaagcaatgtcctttcaattttatcccatctttgttattaccaacagctttaatattcttgttgttctcagttttagctttggtagctttagcaacatcatcacgcacaatagcctcaggggacatgggaagcaaaataattttcttatcatggtgtatgagagaatattgatttgatctaccatgatgcatacaatctgaatcaaattgccatggtctacctagcagaatattacaagcatccataggcacaacatcacagtcaacaacatcacgatatgaaccaatagcaaaattatttcgtaccagcttggttaccttgaccttaccactattgttaagccattgaatgtgatatggatgcgggtgcggtttggtcgtaagtgcaagcttctccaccttgtcgctgctagccaagttgttgcagctacctccatcaatgatcaaacgacatatgtcgctgattctgctctgccttctccatttgtgcactaagcacacgctgtacaatgaggctctcataatgctctgcatcatctgcaccaatctgttcttcgggtggttccttagtgcctgcatcatcagccgcaagcaaagcaagtgtagcttcatccaaatcactagcagaggaatacccaccatcgtcttttaccaccaaaacacgctgattaggacaatcacgctgcacgtgtccatagcccttgcatcgataacacagaacatctcttgttctacccgtggaggctactgaagaggcactacctgctggtttctgggcagatttggttgctgaatttgtggaagatgcacgtggtttgtcgccggaggaaggcgggggtgctggtcgacttggcgagggagttggtgctggtgtacggccggtcatggacgtagtcgtgcgctgttgccatggtgtagattttcctgcagaaagattagaccttgcactagcacgtcgtccctgcacttccctttcagctttgcaagcaagatgaaacaatcgggttacattagcataatctttataagcaaggatgtcctgaatttccctatttaacccgcccaaaaatctagccatagcagattcctcaccctcctctatgttacaacgcagcata

SEQ ID NO: 232 - DNA, 2749 bp, Zea mays
  source (0)...(0): Zea mays BAC clone full insert sequence contig bacm2.pk170.a08.fis39
aaaatgcatcttttgtacacgacatgtctcgtttcttggttatgttgttactccacagggcattgaggtggatagcagcaagattgctgccactcgggagtggcctacaccgacgacggtcacacaaattcggagctttcttggacttgccggtttctaccgcagatttgttcgtgattttagctccattgcagcgcctcgacatgagcttacaaagaaagatgtgccatttgcttggagtgattcataggaggaagcgttcagcactttgaaagataagttaacccaagctcccctattgcaattgcctgattttaataaagtatttgagcttgaatgcgatgctagcggtattgggctaggtgctgttttgttataagaaggataaccagttgcttattttagtgaaaaattaagcggtgctagtctgaaatattctacttatgataaggagctttacactttagtgcgcactttgcatacatggcagcactatctttggcatcgtgagttcataattcattctgatcatgaggctttaaaacatattcatacccaaacaaatctgaaccgtcgtcatgctaaatgggtcgaattcattgagtcctttccttacattattaaacacaagaacgggaaggacaatgttattgctgatgctttgtctcgtcgctataccatgctgtcacaattagattttaaaatctttggtttggacactatgaaggatcaatatgttgacgatgctgattttaaagatgctttcggccattgtattaatgggataccatggggcaaatttcacatacaggatgggttcctgtttcgcgctaacaagctgtgtgttccagctagctcggttcgtcttttgttgttacaagaggcacatggaggcggtctcatggggcattttggcgtctacaaaacgcatgaggtgttggctgcccacttcttttggcctcggatgcgcgctgatgttgagcgccttgttgcacgctgcactacttgtcagaaagctaagtcacggttgaacaaccatggtttgtatatgcctttgcctgtcccttcttctctatggactttgttttgggcttgcctagaactaagaaggggagggatagtatttttgtggttgttgatagattctctaaaatggctcactttataccttgtcataaaactgatgatgctagcattgttgctgaattgttctttagagaaattattcgtttacatggtattccaaaaacaatattctctgatcgcgatgctaagtttctaagccatttttggagatctctttggaataaattgggaactaaattgttgtttagcactacttgtcatcctcagactgatggacaaactgaggtagtaaatagaactttatctaccatgcttagggctgttttagacaagaatttgagacgttgggaggatggcttgcctcatgttgaatttgcttacaatcatgccacgcattcttctacaaagatgtgccctttccagattgtttatggttacatccctagggcacctattgatttgatttcacttaatgctgcgaacgccccacatgtagatgatgctgcacatgttgaacaaatgattaccatacatgaacaaacgaaacagaacattgctgctactaatgcaaaaatcaggttgctggtagtaaaggaagaaaacatgttacttttgagccaggtgatatggtttggttgcacttgagaaaggatcggtttcctactttgcgccgttcaaaattaatgcctcgtgctgctggtccttttaaggtgctaacaaagattaatgctaatgcttatatccttgacctgcctgcggaatttggtgtttccactagttttaatgttgcagatttgaaaccatatatggcagaggttgaggagttgccgtcgaggacgacttcacttcaagaaggggaggatgatgaggacatcacctgcaacatgagtacgactacaccagcagcacctccacattaagccccacttccttcattagctggcccaatcactcgggcctgtgccagagatcttaacttcgtcatgctactgaagaatgagggcccagaagaatagacgaccagcccaactgcggcccatagtggacaacctagggttggccgcccctaggggtgcacgccctctctctatttatctaggagctccgcctcctttgttcttcaagttttgttttacgttagctttagctactctcgaacacgcgcaaatcagcgctgtcttcgtgtattcagaactccaccctcgagtaatagattagattgctcgcacctttttcttgttcgttcttcgattgcgcactggaaacgatcttcgtgatcaggccgatctcgcatcagcaaggtcggtaaccacaaggagttggttcagcgattgcattggcgcctcgggcttgctcgtcgtagtcggatcgcaagggtcatcttccgccaaatcggaattatctccactccccgaaagatcgggcacctcagctatatcaccaggtcgtcattcctttaaataccgctatgaaccgcagcgaggtattcactattttccagtgagctcggtcgaatccaaaattcgcagtgtctcctcttccactacccaaattggtagtgcacggtgaatttgtagtcctttgtggccgtatagccctgacgtgaccccctgtttccaccgaaaaccatcgagacacccatttcccctcatcggaacccgca

SEQ ID NO: 233 - DNA, 2448 bp, Zea mays
  source (0)...(0): Zea mays BAC clone full insert sequence contig bacm2.pk170.a08.fis40
  misc_feature (1)...(2448): n = A,T,C or G
caataacaaagagcatgcttccataggaataacatcgcaatcagcataatcagaataagaacccagcgaaaaggggacacgtaccgaacgtgttacctttattttaccaccatcattaagccattgaatgtgatacggatgtggatgtgtgtgagtgggcaaggataatttctctaccaacgatgtacttgccaaattgttgcagctgccactatcgatgatgatgcgaatcgaccgttcgtgcacgacgcccttggtatggaatagagtgtgtcgctgatttttttcggcctgggcaacctgtgtgctgagaacacgctgcacaacaagactctcatacctatcggcgtcgatgggatcaacgtggacttcctcattttctgcatggttagtggcaatcatagcatgcctagtttcctcagaatcactggctgaagagtactcaccattgtcacgtataagcaaggtacgcttgtttgggcagtcccgaatcatgtgcccaaaccctctgcaacgatggcactgaatatcccgtgtacgtcctgtggaagaagcggcgcctttggcagggggcgccactggcttggtcgtccctgtgcgcgatgtagtgctaggcgtagaaggtgcagggctggaaggagttgagctgtgtgttggaccccggcctgcaaaagagttagtatatgtctttgatcgtcgtccctgcacttcacgttcagctttgcaagcatattcaaacaatgtggttatatcanaataatcccttataatcaagtatatcctgaatttccctgttcaaaccaccacgaaaacgcgccatagcagcatcatccgactcaaccaaaccacaacgaagcatacccttttgtaactcctggtaatattcctcaacagatagtgaaccttgttgaaaacgctgcattttgttaagcaaatcacgagcataataggaaggaacaaatctgtagcgcatggtagtttttaattgggtccaagtaatgacactgttaatgggaagtttttgtttatactcacgccaccaaattaaagcaaaatcagtaaattcactaatggcagccttcacttggctattagcaggaatatcatggcatgaaaatttctgttctacctccaattcccaatcaagatatgcagcaggatcatatttaccattaaaagatggaattttaaatttaatcttagaaaataagtcattagggggatgacgaaccacacgacgtgcacgaccacggcgatctccatcgtcctgctcactgtcaccgccgtattcctgctccatctttgtggtcaatgcatcaaggcgtgccaggatggtgtcgagtgtggtgcgagtcgccgtttgagcaaggtcaagttggttgaaacgctcggtcgtcgaagtgatcgttgaatcaagccgttcatgcatcgtcctaatgtcagcagcaagtccatcaacttgtccccttacttcctgcaactgggcatccaccatgtcgtgtgctcctgccatagttagcgcaaacaccaaaacaccaaaaggagaaaaaccaacgacaaaaacaggggtgtactgctaacaaggcgctcacactagtgctgttatcaagttcttatccgttcttaccaagccacagtggtgaactgcaaccaacaggtggaaccggtgaaagattggatgagcgattgcctggagaaacagaaaccttctcgtcgtagaaagatgtggagttttgggtaggctgcactcaagtcaaggattagcacgatcaaacaataatgcaaagttgaattatagtgcaaaacacgaaaactatattgctggccacaagtgcaaaggacggatggaactagcagaatggcagtaccgtaaatattgtactagcgagaccactagagtgattttgtttttcttttttgtatgatttttttgatatttttctcagcacaagaagcaacaaaataggagctacacgaagtttcacctaaaacagaaatcagatgtggtctacagaaaatcaggaagttctctgaaaagcgtgcgagaactttgatgaatttttttctttattttcctgaatttttttgacaattttgtcgaaccccaaacagaccgtaggtgtgtttggccggcctcagaatggtgtcaacaagctcctgtaaaaatttcagattttttggacacccgagcgaaaagtatgcccgttttacggaaggtacctcaagttatgttttaaaaacgaccgggatgaaacaaccgtatcctttctccctcattttcttttttttctgttttttttgagtaaccgaagaagaaaacaaggaagtgggcgttgagtcgggttgttttttttccgtttttttccgaacccgaagagaaaaacaggaaaggtcgttgacccggnttggtttttccgttttttttacgtacccgaggaggaaaacaag

SEQ ID NO: 234 - DNA, 3782 bp, Zea mays
  source (0)...(0): Zea mays BAC clone full insert sequence contig bacm2.pk170.a08.fis41
aaaactaattctacctatttttttggcttttttctgggcctttaggggataacaaaaacagcgaaggaaaagttaatctcttcaccgataaaaccttgctctgatttcccacctgatgtggccccgttgggtgattgcccgatctttcgatgagaagggtgtggaataactcgattggggaaggagacgatgttcacggcccgactacagccttcaaaagacgctgcgccttagcaaccgatacaccacctcctatggctgtcacgatcttgtggagcgtgacaccctggccactagggcactcgtcctgcaagcaatcaaagaactagcaagaacaagtagaacaagtactgaattaccagatctaaatgtaggtttcaaaatcaaactccaatatggtggggttccgaagacaagaagacgggcggctgaaccagcacgcgcgcttacaagcaagtagcgagagctaaacttgatctaaacaaaacccgatgttcttggtggcggctagggggtttataaacatgggaggacgaccacaagggtattggggtcgtgctgcaaccctaggatgcgtccctaatggacctaacttgatacacgacccattgggccaaaatagggtgacgcagcaccatgggcagaaaaggcaggaaatgtctcggtaagaaaacaatgattacagcggcctcagaacagatatgactataattccggatccatatgaaagtagacttgataagctttccatgttgtgcttgaacattccaatccgagcccgcatctgaccgtggtgaccgtcacaagttggtgttcttctgcagtccgaatccagcatgttcaaatccttttccctttcggtcttctccctgattcctaagcaaaacaagagtgcacgggtctccatggtctaaatatgatggacatgaactcaagagtgtaatcacctgatggttgagttgacgagcacgagcgcgagtaataggaccagaaattggtacttgtattggtatagatgcatcagtagtgtggatgtcttcatcagcacgtcacacattccgaaaacgggttgtcggggtgcatacaaagcacgagtttttgccaccggaaccatttcttcgtttttcgcaacgaacatgcccaatccactactttaggtccaaaactcatgtttggggttgtttcgcgcaatttcgttatcgcacgtcacacattccgaaaacgggttgtcggggtgcatacaaagcacgagtttttgccaccgggaccatttcttcgtttttcgcaacgaacatgcccaatccactactttaggtccaaaactcatgtttgggatggtttcgcgcaatttcgttgtcgcacgtcacacattccgaaaacgggtgtcgggtgcatacaaagcacgagtttttgccagcggaaccatttcgtcgtttttcgcaacgaacatgcccaatcaactagtttaggtccaaaactaatgctgaggtggtttcgcgcaatttcgttgtcgcacgtcacccattctgaaaacgggtatcgaggtgcataaaagcacgagtttttgccatcggaaccatttcttcgtttttcgcaacgaacatgcccaatccactaatttaggtccaaaactcatgtttggggtggtttcgcgcaatttcgttgtcgcacgtcacccattccgaaaacgggtgtcgggtgcacaaagcacgagtttttgccaccggaaccatttcttcgtttttcgcaacgaacatgcccaatccactactttaggtccaaaactcatgtttggggtggtttcgcgcaatttcgttgtcgcacgtcacacattccgaaaacgggtgtcggggtgcatacaaagcacaagtttttgccagcggatccatttcttcgtttttcgcaacgaacatgcccaatccactactttaggtccaaaactcatgtttgaggtggtttcacgcaatttcgttgtcgcacgttgatgaggacatcactatgagtacgactacaccagcagcacctacacatcaagcgccacttccttcattagctgggccaatcactcgggcccgtgccaaagatcttaacatcgtcatgctactgaagaatgagggcccagaagaatagacgaccagcccaactgcggcccatagtggacgacctaggttggccgcccctaggggctgcgccccctctatttatccaggagctgcgcctcctttatttttgagttttgttttacgttagctttagctactctcgaactcgcgcaaatctgcgctgtcttcgtgtattcagaactccaccctcgagtaatagattggattgctcgcatctttttcttgttcgttcttcgattgcgcacaggaaacgatcttcgtgatcaggccgatctcgcatcagcaaggtcggtaaccacagggagttggttcagcgattgcattagcgcctcgggcttgctcgtcgtagtcggatcgcaagggtcatcttccgccaaaccggaattatctctactcgccgaaagatcgggcacctcagctacatcaattaccaatagctttaatattcttgttgttctcagttttagctttgttagctttagcaacatcatcacgcacaatagcctcaggggacgtgggaagcaaaataattttcttatcatggtgtatgagagaatattgatttgatctaccatgatgcatacaatctgaatcaaattgccatggtctacctagcagaaaattacaagcatccataggcacaacatcacagtcaacaacatcacgatatgaaccaatagcaaaattaattcgtaccagcttggttaccttgaccttaccactattgttgagccattgaatgtgatatggatgcgggtgtggtttgatcgtaagtgcaagcttctccaccatgtcgctgctagccaagttgttgcagctacctccatcaatgatcaaacgacatgaacgctccttaatgacacactttgtttgaaacaacgtatgtcgctgattctgctctgccttctccatttgtgcactaagcacacgctgtacaatgaggctctcataatgctctgcatcagctgcaccaatctgttcttcgagtggttccttagtgcctgcatcatcagccgcaagcaaagcaagtgtagcttcatccaaatcactagcagaagaatacccaccatcgtcttttaccaccaaaacacgctgattaggacaatcacgctgcacgtgtccatagcccttgcatcgataacacagaacatctcttgttctacccgtggaggctactgaagaggcactacctgctggtttctgggcagatttggttgctgaatttgtggaagatgcacgtggtttgtcgccggaggaaggcgggggtgctggtcgacttggcgagggagttggtgctagtgtacgaccggtcatggacgtagtcgtgcgctgttgccatggtgtagattttcctgcagaaacattagaccttgcactagcacgtcgtccctgcacttccctttcagctttgcaagcaagatgaaacaatcgggttacattagcataatctttataagcaaggatgtcctgaatttccctatttaacccgcccaaaaatctagccatagcagattcctcaccctcctctatgttacaacgcagcatacccatttgtaattcctgataatattcttctacacttttagtaccctgtctcaattgttgcaacttgtttaacatatcacgtgcataataagaaggaaacaatctagcccgcat

SEQ ID NO: 235 - DNA, 2492 bp, Zea mays
  source (0)...(0): Zea mays BAC clone full insert sequence contig bacm2.pk170.a08.fis42
tccgaaaatgggtgtcggggtgcatacaaagcacgagtttttgccagcggaaccatttcttcgttttcgcaacgaacatgcccaatccactactttaggtccaaaactcatgtttgaggtggtttcgcgcaatttcgttgtcgcacgtcacccattctgaaaacaggtatcgaggtgcataaaagcacgagtttttgccaccggaaccatttcgtcgttttttgcaacgaacatgcccaatccactactttaggtccaaaactcatgtttggggtagtttcgcgcaatttcgttgtcacacgtcacccattccgaaaacaggtgtcggggtgcatacaaagcacgagtttttgccagcggaaccatttcttcgtttttcgcaacgaacatgcccaatccactactttaggtccagaactcatgtttgaggtggtttcacgcaatttcgttgccgcacgtcacccattctgaaaacaggtatcgaggtgcataaaagcacgagtttttgccaccggaaccatttcttcgtttttcgcaacgaacatgcccaatccactactttaggtccaaaactcatgtttggggtggtttcgcgcaatttcgttgtcgcacgtcacccattccgaaaatgggtgtcaggtgcatacaaagcacgagtttttgccaccggaaccatttcttcgtttttcgcaacgaacatgcccaatccactactttaggtccaaaactcatgtttggggtggtttcgcgcaatttcgttgtcgcacgtcacacattccgaaaatgggttgtcggggtgcatacaaagcacgagtttttgccaccggaaccatttcttcgttttttgcaacgaacatgcccaatccactactttaggtccaaaactcatgtttggggtggtttcgcgtaatttcattgtcgcacgtcacccattccgaaaacgggtgtcgggtgcatacaaagcacgagtttttgccaccggaaccatttcgtcgtttttcgcaacgaacatgcccaatccactactttaggtccaaaactcatgtttggggtggtttcgcgcaatttcgttgtcgcacgtcacccattccgaaaacgggtgtcgggtgcatacaaagcacgagtttttgccaccggaacatttcttcgtttttcgcaacgaacatgcccaatccactactttaggtccaaaactcatgtttggggtggtttcgcgcaatttcgttgccgcacgtcaccctccgaaaacgggtgtcgggtgcatacaaagcacgagtttttgccaccggaaccattttttcgtttttcgcaacgaacatgcccaatccactactttaggtccaaaactcatgtttggggtggtttcgcgcaatttcgttgtcgcacgtcacacattccgaaaacgggttgtcggggtgcatacaaagcacgagtttttgccaccggaaccatttcttcgttttttgcaacgaacattcccaatccactactttaggtccaaaactcatgtttggggtggtttcgcgcaatttcattatcgcacttcacccattccgaaaacgggtgtcgggtgcatacaaagcacgagtttttgccaccggaaccatttcgtcgtttttcgcaacgaacatgcccaatccactactttaggtccaaaactcatgtttggggtggtttcgcgcaatttcgttgtcgcacgtcacccattccgaaaacgggtgtcgggtgcagacaaagcacgagtttttgccaccggaacatttcttcgtttttcgcaacgaacatgcccaatccactactttaggtccaaaactcatgtttggggtggtttcgcgcaatttcgttgccgcacgtcaccctccgaaaacgggtgtcgggtgcatacaaagcacgagtttttgccaccggaaccattttttcgtttttcgctacgaacatgcccaatccactactttaggtccaaaactcatgtttggggtggtttcgcgcaatttcgttgtcgcacgtcacctatttcgaaaacgggtgtcggggtgcatacaaagcacgagtttttgccaccggaaccatttcttcgtttttttgcaacgaacatgcccaatccactactttaggtccaaaactcatgtttggggtggtttcgcgcaatttcgttgccgcacgtcacccattccaaaaacgggtgtcgggtgcatacaaagcgcgagtttttgccaccggaaccatttcttcgtttttcgcaacgaacatgcccaatccactactttagctccaaaactcatgtttggggtggtttcgcgcaatttcgttgtcgcacgtcacctattccgaaaacgggtgtcgggttgcatacaaagcacgagtttttaccagcgaaaccttttcttcgtttttcgcaaagaaaatgcccaatccactattttaggtccaaaactcatgtttggaggtggtttcgcgcaatttcgttgtcgcacgtcacctattctgaaaag

SEQ ID NO: 236 - DNA, 3585 bp, Zea mays
  source (0)...(0): Zea mays BAC clone full insert sequence contig bacm2.pk170.a08.fis43
cttggtgcgaggagagtgtggcatattacgagaagcatcatcaacctccaatcctgccataggtagacgaacagaggcaacaagaaaaaaaaacgtgaaggaatataaacactacaactattaggatgtagctactgcaaggcgctcactctcaacctgccagacaagctcttaccaattcttaccttgcacaacaggaggggtcagcaaccaacaagtctacaaccgtggaataagtgtatcggtgccgcagcaacacgacctgtcaaactgcagtcgaaatatgtagagttgtaggtgggctgaagcaaggaatacactagtaccacgttagttacaaaagcaagctgaataatcattcaacggtggtactgtgctggtcctaggctaaaccatgctatagacgtgagcctaggcacaaaggtagtcactgaaaaagaacaactagcacaacacaaagagaaacaacagatttagagattcagcccccttctttcttcttcttttctttttttttcttttcttttcttttctttttttcttcttttttttgcaggggcctaaaccctttttttcactatgacaacccaaacaataagtgatgaggacatcactatgagtacgactacaccagcagcacctccacatcaagcgccacttccttcattagctgggccaatcactcgggcccgtgccagagatcttaacttcgtcatgctactgaagaatgagggcccagaagaatagacgaccagcccaactgcggcccatagtggacgacctagggttggccgccccgaggggctgtgccccctctctctatttatataggagctgcgcctccctttgttcttcgagttttgttttacatctagctttagctaccccagaacacgcacaaatacgtgttgtcctctgtgattcagaactccacctcgagtgatattaaaattgctcgcatctttttcttgttcgttcttcgattgcgcacaggaaacgatcttcgtgatcaggccgatctcgcatcagcaaggtcggtaaccattggaagttggttcagcgattgcattggtgcttcaggatcgctcgtcgtagtcggatcgtgaggttctacttccaccaaatcggaattatctccactcaccgaaagatcgggcactccagctctatcaagtggtatcagatttccaggttgatcggtgagtttatcgagtgtttttttctcctacagtccacaaaaccacataaaaattcaggttagaccttataccagcacccttttgagcctcgcaccttctttcaataatctgcattgttgaatttgtgtgctttcgcgtcatttgttgctggtcgcattgtgtttttttctcaccatccttctttcttccttgtttttctccttcggttacatcaaaccctagcgcgccgcaaccatcttccttattgttctccttcggttacatcaaactctagcgcgccgcaaccatcttccttgtttctctccttcggttacatcaaaccgagtcaacgccgcttccttatttttctccttcggttacgtcaaaaaaaacagaaaaaaaacctagtcaacgccgcttccttgtttttctccttcggttacgtaaaaaaaacagaaacaaaaaaaaagaaaacgaaggagaaaggatacaaagcggttgtctcatctcgatcgttttaaacataccttccttaaaccggacataacttttcgctcggttgttcaaaaaatctgaaatttttacaggagcttgttggcaccattctgatccggcaaacggaccatcggtcggtttggtttcgacaaaattgtcaaaaaaaattcaggaaaataaagaaaaaaaatccgtcaaagttctcgtacgcttttcagagaacttcctgattttctgtagaccacatctgaactctgtttgaggtgaaatttcgtgtagctcctagtttgttgctccttgtgctgagaaaaatatcaaaaaaatcatacaaaaaaaagaaaaacaaaatcacatgtgattcctactagtgcctttttggcctcgctagtacaatatttacggtactgccattctgctagttccatccgtcctttgcacttgtgaccagcaatatagtttcgtgttttgcagtataattcaactttgcattattgtttgatcgtgctaatccttgacttgagtgcagcctacccaaaactccacatatttctacgacgagaaggtttctgtttctccaggcaatcgctcatccaatctttcaccggttccacctgttggttgcagttcaccactgtggcttggtaagaacggataagaatttgataacagcatttcattgagcgagttgtcaccaccatttccctattgtcgtcggtttttctccttttggtgttttggtgtttgcgctaactatggcaggagcacacgacacggtggatgcccagttgctggaagtaaggggacaagttgatggacttgctgctgacattaggatgatgcatgaacgacttgattcaacggtcacttcgacgaccgagcgtttcaaccagcttgaccttgctcaaacggcgactcgcaccacactcgacagcatcctggcacgccttgatgtgttgaccacaaagatggagcaggactacgtcggtgacactgagcaggacgatggggatcgtcgtggtcgtgcacgtcgtgtggttcgtcatccccctaatgacttattttctaagattaaatttaaaattccaccttttaatggcaaatatgatcctgctgcatatcttgattgggagttagaggttgaacaaaaattttcatgccatgatattgctgcacattctcaggttaaagctgctattagtgaatttactgattttgctttaatttggtggcgtgagtctaaaatgaaacatcccactgccattccaaccacttgggatcagttgaaagttgcgatgcgacatcgatttgtgccttcgtattatgctcgtgatttgcttaataaaatgcagcgttttcagcaaggttctcaatctgttgaggactatttccaggagttacaaaaaggtatgattcgatgtgggatattggaggacaacgacgctgttatggcacgttttcgtggtggtttaaaccgcgaaatctaggatatacttgattataaggaatattatgatatgactactttatttgaatatgcttgcaaagctgaacgtgaagtccagggacgccgctcgaagacatattctaacccttttgcaggacgaagctcgacatccacctcagcaccagttccccctgcgccatccacgtccaccactactccacgcgagaagatgaccaaaccagtcagcactgccccacccacaggtcgtacacgggatattcagtgtcatcgctgtagaggatttggccatgtgattcgagactgcccaaacaagcgcactttgctcattcatgacgatggtgagtactcttccgctagtgattctgaagaaattgaacatgcactacttgccactaaccatgaagctcaaacggaggtacatgtcaacccgggcgacgctgataggta

SEQ ID NO: 237 - DNA, 2331 bp, Zea mays
  source (0)...(0): Zea mays BAC clone full insert sequence contig bacm2.pk170.a08.fis44
ctaaagtttcttgctgctagagtttcgagttcgcgccaccttgtttagatcaccatttttagttctctagctgttctctaactgtagttcaaaaaaaacaagggaaaggaaaaaggcaagtgcacaaaaaaaagtcgcgctgatcataaaaaaaaagcacgtacaaaagagagagaaaaaaactacagtaagaatattggtagataaaattctatgtgcaacaaaaaaaagacagtttgtgtgccaccgtttcacaattttataagtcagcttgctgttttgagtatttggtgatatcatttgtgtaacggctcgcgtctctattacggttttggactaggaccagcacaacactattgtggaacgtttattcaacttgttgtggctaacgtggtactagctattccttggaactattgttttagcagccacctataaatccacaatttttttctacaacaccaccaggttgtgctagcagccactgttgctgttcttgctgtttgccagcgccacttgctttgcatggtgagaacttgtaagagcttgatttcttgctagtgaggtagtgtttatccatccacatcacagcaactactaggctgcattacttgtttttgtatctcttttgcactaaccatggcagaggatgcaaatgcgcgacctccacattctccacgaacagtgggcatcattcaacatttcgaacgtcaagtaaggttgcacacagatgccctcaatgaagatgttgaaatcaccaatgagcgcattggtcaattagaaacagcacaaattgttaccaacaacacattgaccactttggaacgaacagttgctgctactaacacctctcttgcagcaattattgagcgcttagataggatggaccaagttgggcgtgaaggtaggcaacaaggtgatgatgatggccatggttccattgctggtaccgcaagagatgatgctacggagtattcagcagacaccgagcatgatgaccgatctattaggcaccgacgacaccaatgacgtgatcgccatggcttgggtggtcgacctccgcgacgtgaggtacgtgaaaatgatgattctctaggaagaattaaattctccataccaccgtttgatggaaaatatgatcctgatgcatatctaacatgggaattgtcggtagatcaaaaatttgcatgctatgatttttctgatgataaaaaggttagagctgctacgagtgaattcactgattttgcttctatttggtggcatgagtaccaaactacacatccagctaccataccacaaacttggaatgctttaaaaagaatcatgcgtagtcgttttgttccttcctatcatgctcgtgatttattacataaattacaacagcttagacaaggcaacaaatctgttgaagagtattatcaacaattacaaataggcatgttgaggtgtggtctcgtagaaaatgaagaagctgcaatggctaggttcatgggtggtttgacaagagaaattcaggatatattagcttacaaggaatacactaatgttactcgcttatttcatcttgcttgtaaggctgaaagagaagtccagggacgatgcttgagaactaacacttatgtaggtcgcaatacatcttggcagccccgcactagtgctgctagctctaaccatgtgtttcagggagatgcttccaatagatcatccacaacaccatcgaaatcagcaccttctcgtgctattgagacagggaaaggatcctcccaagctgtaaccaaatcttcttctattgcttccacgggaagaacaaaggatatccaatgcctccaatgcaaaggatttgggcacatccgaagggattgcccaagcaagcgtgtgctaattataagagaaaatggtgagtactcatcagccagtgatttagataatgatacatatgccatgcttgctgcccaagatgctgaaaaggagaatgatgatgaagagcatattggggctgaacatgctgaacactatgagagcctcgttgtaagacgtgtcttgagtgcccaaattattaaagctgaacaaaaccagcgacacaatttgttccaaactaaatgtgtagttttggaacgatcttgtcgtattataattgatggaggaagctgcaacaacttagcaagcaccaccatggtagagaagcttgggctgaaaacgcttccacatccacacccctactacatccaatggttcaacgacagtggtaagcttaaggtaacacgtatggtccgtgtggaatttacaattggttcataccatgattatattgattgtgatgtggtacct

SEQ ID NO: 238 - DNA, 4940 bp, Zea mays
  source (0)...(0): Zea mays BAC clone full insert sequence contig bacm2.pk170.a08.fis45
  misc_feature (1)...(4940): n = A,T,C or G
ccactactttaggtccaaaacacatgtttggggtggtttcgcgcaagttcattgtcgtacgtcacccattccgaaaacgggtgtcgggtgcatacaaagcacgagtttttgccaccggaaccatttcgtcatttttcgtaacgaacatgcccaatccactactttaggtccaaaacttatgtttggggtggtttcgcgcaatttcattgtcgcacgtcacccattccgaaaacgggtgtcgcgtgcatacaaagcacgagtttttgccagcggaacatttcttggtttttcgcaacgaacatgcccaatccactactttaggtccaaactcatgtttggggtggtttcgcgcaatttcgttgccgcacgtcacccattctggaaacaggtatcgaggtggataaaagcacgagtttttcccaccggaaccatttcttcgtttttcgcaacgaacatgcccaatccactactttaggtccaaaactaatgtttggggcggtttcgcgcaatttcattgtcgcacgtcacccattccgaaaacgggtgtcgggtgcatacaaagcacgagtttttgccaccggaacatttcatcgtttttcgcaacgaacatgcccaatccactactttaggtccaaaactcatgtttggggtggtttcgcgcaatttcgttgccgcacgtcaccctccgaaaatgggtgtcgggtgcatacaaagcacgagtttttgccaccagaaccattttttcgtttttcgcaacgaacatgcccaatccactactttaggtccaaaactcatgtttggggtggtgtcgcgcaatttcgttgtcgcacgtcacncatttcgaaaacgggtgtcggggtgcatacaaagcacgagtttttgccaccggaaccatttcttcgtttttttgcaacgaacatgcccaatccactactttaggtccaaaactcatgtttggggtggtttcgcgcaatttcgttgccgcacgtcacccattccgaaaacgggtgtcgggtgcatacaaagcgcgagtttttgccaccggaaccatttcgtcgtttttcgcaacgaacatgcccaatccactactttagctccaaaactcatgtttggggtggtttcgcgcaatttcgttgtcgcacgtcacctattccgaaaacgggtgtcggggtgcatacaaagcacgagtttttaccagcggaaccatttcttcgtttttcgcaacgaacatgcccaatccactactttaggtccaaaactcatgtttgaggtggtttcgcgcaatttcgttgtcgcacgtcacccattctgaaaacaggtatcgaggtgcataaaagcacgagtttttgccaccggaaccatttcttcgtttttcgcaacgaacatgcccaatccactactttaggtccaaaactcatgtttggggtggtttcgcgcaatttcgttgccgcacgtcacccattccgaaaacgggtgtcaggtgcatacaaagcacgagtttttgcgagcggaaccattttttcgtttttcgcaacgaacatgcccaatccactattttaggtccaaaactcatgtttggggtggtttcgcgcaatttcgttgtcgcacttcacccatttcgaaaacgggtgtcggggtgcacacaaagcacgagtttttgccagcggaaccatttcttcgtttttcgcaacgaacgtgcccaatccactactttaggtccaaaactcatgtttggggtggtttcgcgcaatttcgttgtcgcacgtcacccattccgaaaacgggtgtcaggtgcatacaaagcacgagtttttgccaccggaaccatttcttcgttttttgcaacgaacatgcccaatccaatactttaggtccaaaactcatgtttggggtggtttcgcgcaatttcgttgtcgcacgtcacacattccgaaaacgggtgttggggtgcacacaaagcacgagtttttgctagcgggaccatttcttcgttttttgcaacgaacatgcccaatccacaactttaggtccaaaactcatgtttgaggtggttttgcgcaatttcgttgtcgcacgtcacccattccgaaaacgggtgtcgggtgcatacaaagcacgagtttttgccaccggaaccatttcttcgttttcgcaaagaacatgcccaatccactactttaggtccaaaactcacgtttgggggtggttcgcgcaatttcgttgtcgcacgtcacacattccgaaaacgggttgtcgaggtgcatacacagctcgagtttttgccaccggaaccatttcttcgtttttcgcaacgaacatgcccaatccactactttaggtccaacactcatgtttggggtggtttcgcacaatttcgttgtcgcacgtcacccattccgaaaacgggtgttggggtgcatacaagcacgagtttttgccaccggaaccatttcttcgtttttcacaacgaacatgctcaatccactactttaggtccaaaactcatgtttggggttgtttcgcacaatttcgttgccgcacgtcacccattccgaaaacgggtgtcggggtgcattcaaagcacgagtttttgccaccgaaaccatttcttcatcgagaatcggaatcggtggaggatgtgcatagggtactccgagccctccccttatttagagaaatggaaggtatcttgcgtgagaggaacctgaatctcccgtcagtacaggaaataagcgctttccgtgtgaatctattctctggtatccggcgtgagagtgcgattgcggactagcgcacggtattcatatgagaaaaggttgttcgtggataacagttgtatttctttacttgacccgtacttccttcccttaacctgatccagctagtctttcctaagagataggaagccgagaaactaaacaggggatagctatcgagagaagcatcgaaagtatagaaccccggagcgaggggaaggtcggatccttgaccgagagccatgcatacttttctgacctatgtatgcctttcctcgcctacttcgttcttgctttccaaagaaacttattttatacttgctgtggctaataccccataaattcattctgagcagagctttctagcagattgattgagctatgtaagagtaagtacgtgatgagaatcttgtcatcaaagtgaaagcacatctttgagagtttcatatattccaatatgaagtgaaagggagtcagaggttagcaaatccttatcaaggtgtcttcttttgactagcccatttttggcaacgaacatgcctaatccactactttaggttcaaaactcatgtttgggtggtttcgcgcaattttgttgccgcacatcagccattccaaaaacgggtgtcgaggtgcattcaaagcacgagtttttgccaccggaaccatttcttcttttttcgcaacgaacatgcccactaaactactttaggtccaaaactcttgtttggggtattttcgcgcaatttcgttgccgcacgtcacccattccgaaaaacggttgtcggggtgcattcaaagcacgagtttttgccaccagaaccatttcttcgtttttcgcaacgaacatgcccaatccactacttgatgagaacataacccgcacagatatggccatgataatggctcctgctacaaagacattgaggaacaaagaagttgattggggaccaagtaatgatatttccaacatttccaaccaagcaagcacatcatcaaatttaaagatatacttgggtgaggacgactctattacaagaaggggctatgatgaggacatcactgccatcgatacaaccacaccagcgacccccttcaccatttaatcatggaccagtgaaacgagtctgtgcacgtaaatttaattatcaggtgaactcgttccttgttgttgaagctaatcattccttaaatgaggtactaataccttgtgattactttattatgctaaggtgtttgggaggtgaaccatctagaatttgagaaggcaacaaggcaataaaagctgctccacttgaagggatttcgtaactgcagcaagtgcaagttgaagaggtcatatctttcaactcccaaggccaatgaaggcaaataagcacttgatggaaagcactcttcgtctacttcttggtggagaaagaatcaattagagataccaaatgaggcgtccagaaactgtcgagagaacttcttgactccaccagcccgagggaattcgtaactgcagcaagcaccatattaaatggagcatatatttcatctcccaaggttgtttagtgcaaataagtacttgttggaaagctctattcgtatactttctggcggctgaagaatcaatgggagaaatgatgtgcacccgttgggtgattgcccgatctttcgatgagagggtgtggaataactcgattgggggaggagacgacgttcacggcccgactacagccttccaaagacgctgcgccttagcaaccgatacaccacctcctatggctgtcacgatcttgtggagcgtgacaccctggccactagggcactcgtcctgcaagcaatcgaagaactagcaagaacaagtagaacaagtactgaattaccagatctaaatgtaggtttcaaaatcaaactccaatatggtggggttccgaagacaagaagacggacgactgaaccagcacgcgcgcttacaagcaagtagcgagagctaaacttgatctaaacaaaatccgctgttcttggtggtggctagggggtttataaacatgggaggacgaccacaagggtattggggtcgtgctgcaaccctaggatgcgtccctaatggacccaacttgatacacgacccattgggcccaaaatagggtcacggagcacccatggcagaaaagcaggaaatgtctcggtaaggaa

SEQ ID NO: 239 - DNA, 5565 bp, Zea mays
  source (0)...(0): Zea mays BAC clone full insert sequence contig bacm2.pk170.a08.fis46
gcactaaagcgtaaagctccttatcataagtagaatattttagactagcaccgcttaatttttcactaaagtaagcaactggttttccttcttgtaacaaaacagcacctagcccaataccgctagcatcgcattcaagctcaaaaactttattaaaatcaggcaattgcaagaggggagcttgggttaacttatctttcaaagtgctgaatgctacctcctgcgaatcactccaagcaaacggcacatctttctttgtaagctcatgtagaggcgctgcaatggagctaaaatcacgaacaaatctgcggtagaaaccggcaagtccaagaaagctccgaatttgtgtgaccgtcgtcggtgtaggccactcccgaatggcagcaatcttgctgctatccacctcaatgccctgtggagtaaccacataaccaagaaacgagacacgttgcgtgcaaaatgtgcacttttctatgttaccaaacaagcgagcagcacgcaaagcatcaaaaacagcacgcaaatgttctaaatgctcctctatagacttgctgtaaataaggatatcatcgaaataaacaacaacaaacaaacctatgaaggcccgtagaacttcgttcattaaacgcataaaggtgctgggagcattagtcaatccaaatggcataaccaaccattcatataaaccaaatttcgttttaaaagccgttttccattcatcaccgagtttcattctaatctgatggtaaccgctacgcaaatcaaccttagagaaaataacggcaccactaagctcatctaacatatcatcaaggcgtggaataggatatcgataacgaactgtgatgttattaatagcacgacaatctatgcacatacgccatgacccatctttctttggaacgagtaaaacaggaaccgagcaagggctaagagagtcacgaatgtaacccttatcaagcagcgtctgcacctggcgctggatctccttcgtctcctctggatttgtacggtacggggcgcggttcggaagtgaaccaccggggatgagatcggtctgatgctcaatgccacggaggggaggaagacccggtggtaagtccgtaggataaacatcagcatacttctgcaaaaggttaacaacagcagggggtatatccaaagacggtgcatcatcaagcggaacaagcatgcgcgagcatacaagtgcataacagggcatatgagcttcatggagatcatcaaaatcagcacgtgtagcaagtaaaaccgagagtgcaacctgatttcagatttataggtgcggctgatgtcgatttgacttgttgtgcagttttagcagccctagtaagatcatctttcaaaatttggtcaggggtcattggatgtataattattttctggcctttaaacatgaaagaataatgatttgaacgaccatgatgtaaactatcagtatcatattgccaaggtcgacccaataacaaagagcatgcttccataggaataacatcgcaatcagcataatcagaataagaacccagcgaaaaggggacacataccgaacgtgttacctttattttaccaccatcattaagccattgaatgtgatacggatgtgggtgtgtgcgagtgggcaaggataatttctctaccaacgctgtacttgccaaattgttgcagctgccactatcgatgatgatgcgaatcgaccgttcgtgcacaacgcccttggtatggaatagagtgtgtcgctgatttttttcggcctgggcaacctgtgtgctgagaacacgctgcacaacaagactctcatacctatcgacgtcgatgggaccaacgtggacttcctcattttctacatggttagtggcaatcatagcatgactagtttcctcagaatcactggctgaagagtactcaccattgtcacgtataagcaaggtacgcttgtttgggcagtcccgaatcatgtgcccaaaccctctgcaacgatggcactgaatatcccgtgtacgtcctgtggaagaagcggcgcctttggcaggggcgccactggcttggtcgtcccggtgcgcgatgtagtgctaggcgtagaaggtgcagggctggaaggagttgagttgtgtgtcggaccccggcctgcaaaagagttagtatatgtctttgatcgtcgtccctgcacttcacgttcagctttgcaagcatattcaaacaatgtggttatatcaatataatccttataataaagtatatcctgaatttccctgttcaaaccaccacgaaaacgcgccatagcagcgtcatccgactcaaccaaaccacaacgaagcatacccttttgtaactcctggtaatattcctcaacagatagtgaaccttgttgaaaacgctgcattttgttaagcaaatcacgagcataataggaaggaacaaatctgtagcgcatggcagtttttaattgggtccaagtaatgacactgttaatgggaagtttttgtttatactcacgccaccaaattaaagcaaaatcagtaaattcactaatggcagccttcacttggctattagcaggaatatcatggcatgaaaatttctgttctacctccaattcccaatcaagatatgcagcaggatcatatttaccattaaaagatggaattttaaatttaatctttgaaaataagtcattagggggatgacgaaccacacgacgtgcacgaccacgacgatctccatcgtcctgctcagtgtcaccgccgtattcctgctccatctttgtggtcaatgcatcaaggcgtgccaggatggtgtcgagtgtggtgcgagtcgccgtttgagcaaggtcaagttggttgaaacgctcggtcgtcgaagtgatcgttgaatcaagctgttcatgcatcgtcctaatgtcagcagcaagtccatcaacttgtccccttacttcctgcaactgggcatccaccatgtcgtgtgctcctgccatagttagcgcaaacaccaaaacaccaaaaggagaaaaaccaacgacaaaaacatgggtgtactgctcacaaggcgctcacactagtgctgttatcaagttcttatccgttcttaccaagccacagtggtgaactgcaaccaacaggtggaaccggtgaaagattggatgagcgattgcctggagaaacagaaaccttctcgtcgtagaaagatgtggagttttgggtaggctgcactcaagtcaaggattagcacgatcaaacaataatgcaaaattgaattatagtgcaaaacacgaaaactatattgctggccacaagtgcaaaggacggatggaactagcagaatggcagtaccgtaaatattgtactagcgagaccactagagtgattttgttttttcttttttgtatgatttttttgatatttttctcagcacaagaagcaacaaaataggagctacacgaagtttcacctaaaacagaaatcagatgtggtctacagaaaatcaggaagttctctaaaaagcgtgcgagaactttgatgaatttttttctttattttcctgaatttttttgacaattttgtcgaaccccaaacagaccgtaggtgtgtttggccggcctcagaatggtgtcaacaagctcctgtaaaaatttcagattttttggacacccgagcgaaaagttatgcccgttttacggaaggtacctcaagttatgttttaaaaacgaccgggatgaaacaaccgtatcctttctccttcattttctttttttctgttttttttgagtaaccgaaggagaaaaacaaggaagtggtcgttgagtcggtttgtttttttttctgttttttttcgtaaccgaaggagaaaaacaaggaaacggccgttgactcggtttgttttttctgtttttttttgacgtaaccgaaggagaaaaacaaggaaacgatgttgactcggtttgtggcgtgatcaaacgggagatggtggcggcgctagggtttgaatgatggaagaacacaatgcaaccagcaacaaatgacgtgaaagcacacaaattcaacaatgcagattattgaaagaaagtgcgaggctcaaaagggtgctgggataagatctaacctgaatttttatgtggttttgtggactgtaggaaaaaaacgctcgataaactcaccgatcaacctggaaatctgataccaattgatgtagctgaggtgcccgatctttcggcgagtagagataattccgatttggcggaagatgacccttgcgatccgactacgacgagcaagcccgaggcgccaatgcaatcgctgaaccaactccctgtggttaccgaccttgctgatgcgagatcggcctgatcacgaagatcgtttcctgtgcgcaatcgaagaacgaacaagaaaaagatgcgagcaatctaatctattactcgagggtggagttctgaatcacagaggacagcacgtatttgtacgtgttctggggtagctaaagctagatgtaaaacaaaactccaagaacaaagtaggcgcagctcctatataaatagagagagggggcgcagcccctaggggcggccaaccctaggtcgtccactatgggccgcggttgggctggtcgtctattcttctgggccctcattcttcagtagcatgacgaagttaagatctctggcacgggcccgggtgattggcccagctaatgaaggaagtggtgcttgatgtggaggtgctgctggtgtagtcgtactcatagtgatgtcctcatcatcctccccttcttgaagtgaagtcgtcctcgacggcaactcctcatcctcggccatatatggtttcaaatctgcaacattaaaactagtggaaacaccaaattccgcaggcaggtcaaggatataagcattatcattaatctttgttagcaccttaaaaggaccagcagcacgaggcattaatttagaacggcgcaaagtaggaaatcgatcctttctcaagtgcaaccaaaccatatcacctggctcaaaagtaacaagttttcttcctttactaccagcaatctgattttttgcattagtagcagcaatgttttgttgagtttgttcatggaggttaatcatttgttcaacatgtgcaacaacatctatgtgtggggcgtccgcagcatcaagcgaaaacaaagcaataggcaccctaggaatgtaaccataaacaatttgaaaagggcacatctttgtagaagaatgtgttgcatgattataagcaaactcaacatgaggcaagcaatcctcccaacgtttcaaatttttgtctaaaacagccctaagcatggtagacaaagttcgattaactacctcagtttgaccatcagtctgaggatgacaagtggtgctaaacagcaatttagttcccaatttattccacagagatctccaaaaatgactgagaaacttagcatcacgattcgagactattgtattgggaatatcgtgcaaacgaataatctctctaaaaaacaattcagcaacattgctagcatcatcagtcttatgacaaggtatgaaatgagcca

SEQ ID NO: 240 - DNA, 4594 bp, Zea mays
  source (0)...(0): Zea mays BAC clone full insert sequence contig bacm2.pk170.a08.fis47
gcgcgcatccgaggccaaaagaagtgggcagccaacacctcatgcgttttgtagacgccaaaatgccccgtgagaccgcctccatgcgcttcctgtaacaacaaaagacgaaccgagctagctggaacacacagcttgttagcgcgaaacaggaacccatcctgtatgtgaaatttgccccatggtatcccattaatacaatggccgaaagcatctttaaaatcagcatcgtcaacacattgatccttcacagtgtccaaaccaaagattttaaaatctaattgtgacataatggtatagcgacgagacaaagcatcagcaataacattgtacttcccgttcttgtgtttaataatgtaaggaaaggactcaatgaattcgacccatttagcatgatgacggttcagatttgtttgggtacgaatatgttttaaagcctcatgatcagaacgaattatgaactcacgatgccgaagatagtgctgccatgtatgcaaagtgcacactaaagcgtaaagctccttatcataagtagaatatttcagactagtaccgcttaatttttcactaaaataaacaactggttttccttcttgtaacaaaacatcacctaaaccaataccgctagcatcgcattcaagctcaaaaactttattaaaattaggcaattgcaagaggggagcttgggttaacttatctttcaaagtgttgaacgctacctcctgcgaatcactccaagcaaacggcacatctttctttgtaagctcatgtagaggcgctgcaatggagctaaaatcacgaacaaatctgcggtagaaatcggcaagtccaagaaagctccgaatttgtgtgaccgtcgtcggtgtaggccactcccgaatggcagcaatcttgctgctatccacctcaatgccctgcggagtaaccacataaccaagaaacgagacacgttgcgtgcaaaatgtgcacttttccatgttaccaaacaagcgagcagcacgcaaagcatcaaaaacagcacgcaaatgttctaaatgctcctctatagacttgctgtaaataaggatatcatcgaaataaacaacaacaaacaaacctatgaaggcccgtagaacttcgttcattaaacgcataaaggtgctaggagcattagtcaatccaaatggcataaccaaccattcatataaaccaaatttcgttttaaaggccgttttccattcgtcatcgagtttcattctaatctgatggtaaccgctacgcagatcaaccttagagaaaataacggcaccactaagctcatctaacatatcatcaaggcgtggaataggatatcgataacgaactgtgatgttattaatagcacgacaatctacgcacatacgccatgacccatctttctttggaacgagtaaaacaggaaccgagcaagggctaagagactcacgaatgtaacctttatcaagcagcgtttgcacctggcgctagatctccttcgtctcatctggatttgtacggtacggggcgcggttcagaagagaagcgccggggatgagatcgatctgatgctcaatgccacggaggggaggaacacccggtggtaagtccgtaggataaacatcagcatactcctgcaaaaggttaacaacagcagggggtatatccaaagacggtgcatcatcaagcggaacaagcatgcgcgagcatacaagtgcataacagggcatatgagcttcatggagatcatcaaaatcagcacgtgtagcaagtaaaacaggtgagtgcaacttgatttcagatttaataggtgcggctgatgttgatttgacttgttgtgcagttttagcagccctagtaagatcatctttcaaaatttggtcaggggccattggatgtataattattttctagcctttaaacatgaaagaataatgatttgaatgaccatgatgtaaactatcagtatcatattgccaaggtcgacccaataacaaagagcatgcttccataggaataacatcgcaatcagcataatcagaataagaacccagcgaaaaggggacacgtaccgaacgtgttacctttattttaccaccatcattaagtcattgaatgtgatacggatgtgggtgtgtgcgagtgggcaaggataatttctctaccaacgctgtactggccaaattgttgcagctgccactatcgatgatgatgcgaatcgaccgttcgtgcacaacgcccttggtatggaatagagtgtgtcgctgatttgtttcggcctgggcaacctgtgtgctgagaacacgctgcacaacaagactctcatacctatcggcgtcgatgggatcaatgtggacttcctcattttctgcatggttagtggcaatcatagcatgactagtttcctcagaatcactggctgaagagtactcaccattgtcacgtataagcaaggtacgcttgtttgggcagtcccgaatcatgtgcccaaaccctctgcaacgatggcactgaatatcccgtgtacgtcctgtggaagaagcggcgcctttggcagggggcgccactggcttggtcgtccctatgcgcggtgtagtgctaggagtagaaggtgcagagctggaaggaattgagctgtgtgtcggaccccggcctgcaaaagagttagtatatgcctttgatcgtcgtccctgcacttcacgttcagctttgcaagcatattcaaacaatgtggttatatcaaaataatccttataatcaagtatatcctgaatttccctattcaaaccaccacgaaaacgagccatagcagcgtcatccgactcaaccaaaccacaacgaagcattttgtaactcttggtaatattcctcaacagattgtgaaccttgttgaaaacgctgcattttgttaagcaaatcacgagcataataggaaggaacaaatctgtggcgcatggcagtttttaattgggtccaagtagtgacactattaatgggaagtttttgtttatactcacgccaccaaattaaagcaaaatcggtaaattcactaatggcagccttcacttggctattagcaggaatattatggcatgaaaatttctgttctacctccaattcccaatcaagatatgcagtaggatcatatttaccattaaaagatggaattttaaatttaatcttagaaaataagtcattaggggtatgacgaaccacacggcgtgcacgaccacggcgatctccatcgtcctgctcagtgtcaccgccgtattcctgctccatcttggtggtcaacgcatcaaggcgtgccaggatggtgtcgagtgtggtgcgagtcgccgtttgagcaaggtcaagctggttgaaacgctcggtcgtcgaagtgaccgttgaatcaagccattcatgcatcgtcctaatgtcagcagcaagtccatcaacttgttcccttacttcctgcaactgggcatccaccatgccgtgtgctcctgccatagttagcgcaaacaccaaaacacaaaaaggagaaaaaaccgacgacaacaggggaatggtggtgacaacttgctcgctcaatggaatgctgttatcaagttcttatacgttcttacaaagccacagtggtgaactgcaatcaacaggtggaaccggtgaaagattggatgagcgattgcgtggagaaacagaaacctgctcgtcgtagaaatatgtggagttgtgggtaggctgcactcaagtcaaggataagcacgatcaaacaataatgcaaagttgaattatagtgcaaaacactaaactatattgctggccacaggtgcaaaggacggatggaactagcagaatggcagtaccgtaaatgttgtactagtgatgccaaaaaggcactagtaggaatcacaggtgattttgtttttcttttttgtatgatttttttgatatttatctcagcacaagaagcaacaagataggagctacacgaagtttcacctaaaacatatatcagatgtggtctatagaaaatcaggaagttctctgaaaagcgtgcgagaactttgacgaatttttttctttattttcctgaatttttttgaaaattttgtcgaaccccaaacagaccgtaggtgagtttggccggcctcagaatggtgtcaactagctcctgtaaaaatttcagattttttggacaaccgagcgaaaagttatgctcggtttaaggaaggtacctcaagttatgtgtaaaccgaccgagatgagacaaccgctttgtttccttcctttccctatttttttgtttgttctctggttctatcctttctctttctttttctttttttctttttttgtttctgtttttttacttaaccgaaggagaaaaacaaggaagcggcgttgactcggtttgtggcgttgaatcggtttgatgtaaccgaaggagagaaacaaggaagatggttgtgacgcgctagggtttgatgtaaccgaaggagaaaaacaaggaagatggttgcggcgcgctagggtttgatttagccgaaggagaaaaacaaggaagaagaaggatggtgagaaaaacacaatgcgaccaccccctcttcgtaaa

SEQ ID NO: 241 - DNA, 3292 bp, Zea mays
  source (0)...(0): Zea mays BAC clone full insert sequence contig bacm2.pk170.a08.fis48
ggagctacacgaagtttcacctaaaacagaggtcagatgtggtctacagaaatgaggaattctctgaaaagcgtgtgataactttgacaaatttttttctttattttcctgaatttttttgacaattttgtcgaaaccaaacagaccgaaggtgagtttggccggcctcagaatggtgtcaacaagctcctgtaaaaatttcagattttttggacaaccgagcgaaaagttatgcccggtttaagaaaagtacctcaagttatgtttaaaacgaccgagatgagtcaacaagttccttacttttttttgtttgttctctggttctatcctttctctttcattttctttttttttcttttgtttctgtttttttacgtaaccgaaggagaaaaacaaggaagcggcgttgactcggtttgttgtaaccgaacgagagaaacaaggaagatggttgcggcgcgctagggtttgatgtaaccgaaggacaaaaacaaggaagatggttgcggcgcgctagggtttgatgtaaccgaaggagaaaaacaaggaagaaagaaggatggcgagaaaaaaacacaatgcgaccagcaacaaatgacgcgaaagcacacaaattcaacaatgcagattattgaaagaaagtgcgaggctcaaaagggtgttggtatatggtctaacctgaacttttatgtggttttgtggactgtaggagaaaaaaacactcgataaactcaccgatcaacctggaaatctgataccaattgatatagctgaggtgcccgatctttcggcgagtagagataattccaatttggcgaaagatgacccttgcgatccgactacgacgagcaagcccgaggcgccaatgcaatcgctgaaccaactccctgtggttaccgaccttgctgatgcgagatcggcctgatcacgaagatcgtttcctgtgcgcaatcgaagaacgaacaagaaaaagatgcgagcaatctaatctattactcgagggtggagttctgaatacacgaggacagcgcagatttgcgcgtgttcgagagtagctaaagctaatgtaaaacaaaattccaaaacaaaggaggcgcagctcctggataaatagagaggggcgctgcccctaggggcggccaaccctaggtcgtccactatgggccgcagttgggctagtcgtctattcttctgggccctcattcttcagtagcatgacgaagttaagatctctggcacgggcccgagtgattggcccagctaatgaaggaagtggcgcttgatgtggaggtgctgctggtgtagtcgtactcatagtgatgtcctcatcaccattgtcacgtataagcaaggtacgcttgtttgggcagtcccgaatcatgtgctcaaaccctctgcaacgatggcattgaatatcccgtgtacgtcctgtggaagaaacgacgcctttggcagggggcgccgctggcttggccgtccctgtgcgcggtgatagagctggagtgcccgatctttcggtgagtggagataattccgatttggtggaagtagaccctcacgatccgactacgacgagcgaacccgaagcgccaatgcaatcactgaaccaactcccaatggttaccgaccttgctgatgcgagatcggcctgaccacgaagatcgtttcctgtgcgcaatcgaagaacgaacaagaaaaagatgcgagcaatcttaatatcactcgaggtggagttctgaatcacagaggacagcacatatttgtgcgtgttctggggtagctaaagctagatgtaaaacaaaactcgaggaacaaaggaggcgcagctcctggataaatagagagagggggcgcagcacctaggggcggccaaccctaggtcgtccactatgggccgcagttgggctggtcgtctattcttctaggccctcattcttcagtagcatgacgaagttaagatctctggcacgggcccgagtgattggcctagctaatgaaggaagtggcacttgatgtggaggtgctgctggtgtagtcgtactcatagtgatgtcctcatcatcctccccttcatgaagtgaagtcgtcctcgacggcaactcctcatcctcggccatatatggtttcaaatctgcaacattaaaactagtggaaacaccaaattccgcaggcaggtcaaggctataagcattatcattaatctttgttagcaccttaaaaggaccagcagcacgaggcattaatttagaatggcgcaaagtaggaaaccgatcctttctcaagtgcaaccaaaccatatcacctggctcaaaagtaacaagttttcttcctttactaccagcaacctgattttttgcattagtagcagcaatgttttgttgagtttgttcatggaggttaatcatttgttcaacatgtgcaacaacatctatgtgtggggcgtccgtagcatcaagcgaaaacaaagcaataggcgccctaggaatgtaaccataaacaatttgaaaagggcacaggaaacgatcttcgtgatcaggccgatctcgcatcagcaaggtcggtaaccacagggagttggttcagcgattgcattggcgcctcgggcttgctcgtcgtagtcggatcgcaagggtcatcttccgccaaatcggaattatctctactcgccgaaagatcgggcacctcagctacatcaattggtatcagatttccaggttgatcggtgagtttatcgagcgttttttttcctacagtccacaaaaccacataaaaattcaggttagatcttatcccagcacccttttgagcctcgcactttctttcaataatctgcattgttgaatttgtgtgctttcgcgtcatttgttgctggttgcattgtgttcttccatcattcaaacgctagcgccgccaccatctcccatttgatcacgccacaaaccgagtcaacatcgttttccttgtttttctcccttcgggttacgtaaaaaaaaacagaaaaaaacaaaccgaggtcaccgaccgtttccttggtttttctcctcgggttcgaaaaaaaacggaaaaaaaacaaaccgactcaacggacacctcccttggtttttctccctccgggttcctgcaaaaaaaccgggaaaaaaaagaaaattggggggaaaaggggaccggttgggtttcatccccgtccgtttttaaaaacaaaacttgggggggaaccttccggaaaaaagggggcttaactttttccccccgggggggcccccaaaaaaacctggaaattttttcaccgggg

SEQ ID NO: 242 - DNA, 15768 bp, Zea mays
  source (0)...(0): Zea mays BAC clone full insert sequence contig bacm2.pk170.a08.fis49
  misc_feature (1)...(15768): n = A,T,C or G
ttgaacattccaatccgagccgaccgtggtgaccgtcacaagttggtgttcttctgcagtccgaatccagcatgttcaaatccttttccctttcggtcttctccctggttcctaagcaaaacaagagtgcacgggtctccatggtctaaataagatggacatgaactcaagagtgtaatcacctgatggttgagttgacgagcacgagcgcgagtaatgggaccagaaattggtacttgtattggcatagatgtatcagtagtgtggatgtcttcatcacccaatccactactttaggtccaaaactcatgtttggggtggtttcgcgcaatttcgttgtcgctcgtcacccattccgaanacgggtgtcgggtgcatacaaagaacgagtttttgcaaccggaaccattttttcgtttttcgctacgaacatgcccaatccactactttaggtccaaaactcatgtttggggtggtttcgcgcaatttcgttgtcgcacgtcacctatttcgaaaacgggtgtcggggtgcatacaaagcacgagtttttgccaccggaaccatttcttcgtttttttgcaacgaacatgcccaatccactactttaggtccaaaactcatgtttggggtggtttcgcgcaatttcgttgccgcacgtcacccattctgatgaggacatcaacaccaacacgagcacatctacaccagcagcaccttctccagcccaggcaccatcttccccagtccaggcgccaccccttccacctgggccagtgactcgggcccgtgcaagagaattgaactacatcatgttgttaaagaacgaaggcccggaagaatagacgaccagcccaattgcggcccataatggacgacctagggttggccgcccctaggggctgcgccccctctctatttatacaggagctgcgcctcctttattttctgagttttgttttacattagctttagctactctcgaacacgcgcaaatctgcgctgtcttcgtgtattcagaactccaccctcgagtaatagattagattgctcgcatctttttcttgttcgttcttcgattgcgcacaggaaacgatcttcgtgatcaggccgatctcgcatcagcaaggtcggtaaccacagggagttggttcagcgattgcattggcgcctcgggcttgctcgtcgtagtcggatcgcaagggtcaacttccgccaaatcggaattatctctactcgccgaaagatcgggcacctcagttacatcaattggtatcagatttccaggttgatcggtgagtttatcgagtgttttttttcctacagtccacaaaacaacataaaaattcaggttagaccttatcccagcacccttttgagcctcgcactttctttcaataatctgcattgttgaatttgtgtgctttcgcgtcatttgttgctggttgcattgtgttcttccaccattcaaatcctagcgccgccaccatctcccctttgatcacgccacaaaccgagtcaacattgtttccttgtttttctccttcggttacgtcaaaaaaaacagaaaaaacaaaccgagtcaacggccgtttccttgtttttctccttcggttacgaaaaaaaaaacagaaaaaaaaaaccgagtcaacatcgtttccttgtttttctccttcggttacgtaaaaaaaacagaaacaaaaaacaacgaaggagaaaggatacggttgtttcatcccggtcgtttgaaaacataacttgaggtaccttccttaaaccgggcataacttttcgctcgggtgtccgaaaaatctgaaatttttacaggagctagttgacaccattctgaggccggccaaacttaccttcggtctgtttgggttcgacaaaattgtcaaaaaaattcaggaaaataaagaaaaaaatccgtcaaaattctcgcacgcttttcagagaactttctgattttctgtagaccacatttgaactctgttttaggtgaaacttcgtgtagctcctattttgttgcttcttgtgctgagaaaaatatcaaaaaaatcatacaaaaaagaaaaacaaaatcacttgtgattcctactagtggcctcgctagtacaatagttacggtactgccattctgctagttccattcgtcctttgcacttctggccagcaatatagtttcgtgttttgcactataattcaactttgcattattgtttggtcgtgctaatccttgacttgagtgcagcctacccacaactccacatatttctacgacgagtaggtttctgtttctccaggcaatcgctcatccaatctttcaccggttccacctgttggttgcagttcaccactgtggcttggtaagaacggataagaatttgataacagcagtagtgtgagcgccttgtgagcagtacacccctgtttttgtcgttttttttggtgttttggtgtttgcgctaactatggcaggagcacatgacacggtggatgcccagttgctggaagtaaagggacaagttgatggacttgctgatgacattaggacaatgcatgaacggcttgattcaacggtcacttcgacgaccgagcgtttcaaccagcttgaccttgctcaaacggcgactcgcaccacactcgacaccatcctggcacgccttgatgcgttgaccacaaagatggagcaggactacggcggtgacactgagtgggacgatggagatcgccgtggtcgtgcacgccgtgtggttcgtcatccccctaatgacttattttctaagattaaatttaaaattccatcttttaatggcaaatatgatcctgctgcatatcttgattgggagttagaggttgaacaaaaattttcatgccatgatattgctgcacattctcaggttaaagctgctattagtgaatttactgattttgctttaatttggtggcgtgagtttaaaataaaacatcccactaccattccaaccacttgggatcagttgaaagctgcgatgcgacattgatttgtgcattcgtattatgctcgtgatttgcttaataaaatgcagcgttttcagcaaggttctcaatctgttgaggactatttccaggagttacaaaaaggtatgattcgttgtgggatattggaggacaacgacgctgctatggcacgttttcgtggtggtttaaaccgcgaaatccaagatatacttgattataaggaatattatgatatgactactttatttgaatatgcttgcaaagctgaacgtgaagtgcagggacgccgctcgaagcaatattctaacccttttgcaggacgaagctcgacatccacctcagcaccagttccccctgcgccatccacgtccaccactactccacgcgagaagacgaccaaaccagccagcactgccccacccacaggtcgtacacgggatattcagtgtcatcgctgtagaggatttggccatgtgattcgggactgcccaaacaagcgcactttactcattcgtgacgatggtgagtactcttccgctagtgattctgaagaaattgaacatgcactacttgccactgaccatgcagctaaggcggaggtacatgtcaacccgggcgacgctgataggtatgaaagtcttgttgtgcagcgtgttctcagtacacaggtcgctttgcccgagaagaatcagcgacacactctgttccatacaaagggtgttgtgcaggagcggtcaattcgcatcattatcgacagcggcagttgcaacaatttggcgagtaccatgctggtcgaaaagttgtcgttacccactcgtaagcatccaaacccatatcacattcaatggcttaatgatggtggtaaaataaaaatcacgcgttccgtgcgagttcctttctccatgggtgcttattctgattttgttgattgtgatgttattcccatggaagcatgctctttgttacttggtcgaccttggcaatatgatactgatagcttgcatcatggtcgttcgaatcattattctttcatttttaagggtcagaaaataattatacatccaatgacacctgaacaaattgttaaagatgatcttgcccgagctgctataactgctaaacaacttgatccatcaccctctgtaccttctgaaattaagttgaaggctcctgttttacttgctacacgtgctgattttgatgatctacacggtgctcatttgccatgctatgcacttgtatgctctagtgtcctcatttcacttgatgatgcaccatctttggctattccccctatggttgctaaccttttgcaggagtacgctgatgtctttcccaaagacttaccaccgggtctcccaccgcttcgtggcattgagcaccagatcgacctcattcccggtgcacagcttccaaaccgcgcaccataccgtacaaatccggatgagacgaaggagattcagcgccaggtacaggcattgcttgacaaaggatacattcgtgagtctcttagcccttgctctgttcctgtgttacttgttcccaagaaggatgggtcatggcgtatgtgtgtagactgtcgtgctattaataatatcactattcgttatcgctatcctataccacgccttgatgatatgctagatgagcttagtggtgccattattttcactaagattgatttgcgtagtggttaccaccagattagaatgaaactgggtgatgaatggaaaacagccttcaaaacgaaatttggtttatatgaatggttggttatgccgtttggattgactaatgctcccagcacttttatgcgagtgatgaatgaagttttgaggcccttcataggattgtttgtggttgtttatttcgatgatatccttatttacagcaaatctaagaaagagcatttggaacatttaagagctgtttttgatgcattgcgtgccgcccagttattcgctaacatggaaaaatgcatcttttgcacacgacgtgtctcgtttcttggttatgttgttactccacagggcattgaggtggatagcagcaagattgctgccattcgggagtggcctacaccgacgacggtcacacaaattcggagctttcttggacttgccggtttctaccgcagatttgttcgtgattttagctccattgcagcgcctctacatgagcttacaaagaaagatgtgccgtttgcttggagtgattcgcaggaggaagcgttcagcactttgaaagataagttaacccaagctcccctattgcaattgcctgattttaataaagtatttgagcttgaatgcgatgctagcggtattgggctaggtgctgttttattacaagaaggaaaaccagttgcttattttagtgaaaaattaagcggtgctagtctgaaatattctacttatgataaggagctttacgcgttagtgcgcactttacatacatggcagcactatctttggcatcgtgagttcataattcattctgatcatgaggctttaaaacatattcgtacccaaacaaatctgaaccgtcgtcatgctaaatgggtagaattcattgagtcttttccttacattattaaacacaagcacgggaaggacaatattattgctgatgctttgtctcgtcgctataccatgctgtcacagttagattttaaaatctttggtttgcacactataaaagatcaatatgttgacgatgctgattttaaagatgctttcggccattgtattaatgggaaaccctggggcaaatttcacatacaggatgggttcctgtttcgcgctaacaagctgtgtgttccagctagctcggttcgtcttttgttgttacaggaagcacatggaggcggtctcatggggcactttggcgtctacaagacacatgaggtgttggctgcccacttcttttggcctcggatgcgcgctgatgttgagcgccttgttgcacgctgcactacttgtcagaaagctaagtcacggttgaacaaccatggtttgtatatgcctttgcctgttcctacttccccttggattgatatttcgatggattttattttgggattgcctagaactaagaaggggagggatagcatttttgtggttgttgatcgattctccaaaatggctcatttcataccttgtcataagactgatgatgctagcaatgttgctgaattgttttttagagagattattcgtttgcacggtattcccaatacaatagtctcggatcgtgatgccaagtttctgagtcatttttggagatctctgtggaataaattaggaactaaattgctgtttagcaccacttgtcaccctcagactgatggtcaaactgaggtagttaatcgaactttgtctaccatgcttagggctgttttagacaaaaatttgaaacgttgggaggattgcttacctcatgttgagtttgcttataatcatgcaacacattcttctacaaagatgtgcccttttcaaattgtttatggttacattcctagggcgcctattgctttgttttcgcttgatgctacggacgccccacacatagatgctcttgcacatgttgaacaaatgattaatctccatgaacaaactcaacaaaacattgctgctgctaatgctaaatatcagattactggtagtaaaggccggaaactagttacttttgaacctggtgatatggtttggttgcatttgagaaaggatcgttttcctactttgcgccgttctaaattgatgcctcgtgctgctggtccttttaaggtactaaccaagattaatgataatgcttatatccttgacctgcctgcggagtttggtgtttccactagttttaatgttgcagatttgaaaccgtatgcgggagaagatgaggagttgccgtcgaggacgacatcagttcaagaaggggaggatgatgaggacatcaacaccaacacgagcacatctacaccagcagcaccttctccagcccaggcaccatcttccccagtccaagcgccaccccttccacctgggccagtgactcgggcccgtgcaagagaattgaactacatcatgttgttaaagaacgaaggcccggaagaatagacgaccagcccaattgcggcccataatggacgacctagggttggccgcccctaggggctgcgccccctctctatttatacaggagctgcgcctcttttattttctgagttttgttttacattagctttagctactctcgaacacgcgcaaatctgcgctgtcttcgtgtattcagaactccaccctcgagtaatagattagattgctcgcatctttttcttgttcgttcttcgattgcgcacaggaaacgatcttcgtgatcaggccgatctcgcatcagcaaggtcggtaaccacagggagttggctcagcgattgcattggcgcctcgggcttgctcgtcgtagtcggatcgcaagggtcaacttccgccaaatcggaattatctctactcgccgaaagatcgggcacctcagttacatcacattccgaaaacgggtgtcgggtgcatacaaagcacgagtttttgccaccggaaccatttcgtcgttttttgcaacgaacatgcccaatccactactttaggtccaaaactcatgtttggggtggtttcgcgcaatttcgttgtcgcacgtcacttattccgaaaacgggtgtcggggtgcatacaaagcacgagtttttaccagcggaaccatttcttcgtttttcgcaaagaacatgcccaatccactactttaggtccaaaactcatgtttgaggtggtttcgcgcaatttcgttgtcgcacgtcacccattctgaaaacaggtatcgaggtgcataaaagcacgagtttttgccaccggaaccatttcttcgtttttcgtaacgaacatgcccaatccactactttaggtccaaaactcatgtttggggttgtttcgcgcaatttcgttgtcgcacgtcacacattccgaaaacgggttgtcggggtgcaaacaaagcacgagtttttgccaccggaaccatttcttcgtttttcgcaacgaacatgcccaatccacaactttaggtccaaaactcatgtttggggtggtttcgcgcaatttcgttgtcgcacgtcacacattccgaaaacgggtgtcgggtgcatacaaagcacgagtttttgccagcggaaccatttcgtcgtttttcgcaacgaacttgcccaatccactagtttaggtccaaaactcatgtttgaggtggtttcgcgcaatttcgttgtcgcacgtcacccattctgtaaacgggtatcgaggtgcataaaagcatgagttttttccatcggaaccatttcttcgtttttcgcaacgaacatgcccaatccactactttaggtccaaaactcatgtttggggtggtttcgcgcaatttcgttgtcgcacgtcacccattccgaaaacgggtgtcgggtgcatacaaagcacgagtttttgcgagcggaaccattttttcgtttttcgcaacgaacatgcccaatccactactttaggtccaaaactcatgtttggggtggtttcgcgcaatttcgttgtcgcacgtcacccatttcgaaaacgggtgtcgggggtgcatacaaagcacgagtttttgccaccggaaccatttcttcgtttttcgcaacgaacatgcccaatccactactttaggtccaaaactcatgtttggggtggtttcgcgcaatttcgttgtcgcacgtcacccattccgaaaacgggtgtcgggtgcatacaaagcacgagtttttgccaccggaaccatttcttcgtttttcgcaacgaatatgcccaatccactactttaggtccaaaactcatgtttggggtggcttcgcgcaatttcgttgtcgcacgtcacacatttcgaaaacgggttgtcgggggtgcatataaagcacgagtttttaccagcggaaccatttcttcgtttttcgcaacgaacatgcccaatccactactttaggtccaaaactcatgtttggggtggtttcgctcaatttcgttgtcgcacgtcacccattccgaaaacgggtgtcggggtgcatacaaagcacgagtttttggcagcggaaccatttcttcgtttttcgcaacgaacatgcccaatccactactttagatccaaaactcatgtttgaggtggtttcgcgcaatttcgttgtcgcacgtcacccattctgaaaacaggtatcgaggtgcataaaagcacgagtttttgccaccggaactatttcttcgtttttcgcaacgaacatgcccaatccactactttaggtccaaaactcatgtttggggtggtttcgcgcaatttcgttatcgcacgtcacccattccgaaaacgggtgtcgggtgcatacaaagcacgagtttttgcgatcggaaccattttttcgtttttcgcaacgaacatgcccaatccactactttaggtccaaaactcatgtttggggtggtttcgcgcaatttcgttgtcgcacgtcacccatttcgaaaacgggtgtcgaggtgcatacaaagcacgagtttttaccagcggaaccatttcttcgttcttcgcaacgaacatgcccagtccactactttaggtccaaaactcatgtttgaggtggtttcgcgcaatttcgttgtcgcacgtcacccattctgaaaacaggtatcgaggtgcataaaagcacgagtttttgcgaccggaaccattttttcgtttttcgcaacgaacatgcccaatccactactttaggtccaaaactcatgtttggggtggtttcgcgcaatttcgttgtcgcacgtcacccatttcgaaaacgggtgtcggggtgcatacaaagcacgagtttttaccagcggaaccatttcttcgtttttcgcaacgaacatgcccaatccactactttaggtccaaaactcatgtttgaggtggtttcgcgcaatttcgttgtcgcacgtcacccattctgaaaacaggtatcgaggtgcataaaagcacgagtttttgccgccggaaccatatcttcgtttttcgcaacgaacatgcccaatccacttttaggtccaaaactcatgtttggggtggtttcgcgcaatttcgttgtcgcacgtcacccattccgaaaacgggtgtcgggtgcatacaaagcacgagtttttgccaccggaaccatttctttgtttttcgcaacgaacatgcccaatccactactttaggtccaaaactcatgtttggggtggtttcgcgcaatttcgttgtcgcacgtcacacattccaaaaacgggtgtcggggtgcatacaaagcacgagtttttgccagcggaaccatttcttcgtttttcgcaacgaacatgcccaatccactactttaggtccaaaactcatatttggggtggtttcgcgcaatttcgttgtcacaagttacccatttcaaaaacgggtgtcggggtgcatacaaagcacgagtttttaccagcggaaccatttcttcgtttttcgcaacgaacatgcccaatccactactttaggtccaaaactcatgtttgaggtggtttcgcgcaatttcgttgtcgcacgtcacccattctgaaaacaggtatcgaggtgcataaaagcacgagtttttgccgccggaaccatatcttcgtttttcgcaacgaacatgcccaatccacttttaggtgcaaaactcatgtttggggggggtttcgcgcaaattcgttgtcgcacgtcacccattccgaaaacgggtgtcaggtgcatacaaagcacgagtttttgccaccggaaccatttcttcgtttttcgcaacgaatatgcccaatccactactttaggtccaaaactcatgtttggggtggtttcgcgcaatttcgttgtcgcacgtcacacatttcgaaaacgggttgtcgggggtgcatacaaagcacgagtttttaccagcggaaccatttcttcgtttttcgcaacgaagatgcccaatccactactttaggtccaaaactcatgtgtggggtggtttcgctcaatttcgttgtcgcacgtcacccattcagaaaacgggtgtcggggtgcatacaaagcacgagtttttgccagcggaaccatttcttcgtttttcgcaacgaacatgcccaatccactactttaggtccaaaactcatgtttgaggtggtttcgcgcaatttcgttgtcgcacgtcacccattctgaaaacaggtatcgaggtgcataaaagcacgagtttttgccaccggaaccatttcttcgtttttcgcaacgaacatgcccaatccactactttaggtccaaaactcatgtttggggtggtttcgcgcaatttcgttgtcgcacgtcacccattccgaaaacgggtgtcgggtgcatacaaagcacgagtttttgccaccggaaccatttcttcgtttttcgcaacgaacatgcccaatccactactttaggtccaaaactcatgtttggggtggtttcgcgcaatctcgttgtcgcacgtcacccattccgaaaacgggtgtcgggtgcacaaagcacgagtttttgccaccggaaccatttcttcgtttttcgcaacgaacatgcccaatccactactttaggtccaaaactcatgtttggggtggtttcgctcaatttcgttgtcgcacgtcacccattccgaaaacgggtgtcggggtgcacacaaagcacgagtttttgccagcggaaccatttcttcgtttttcgcaacgaacgtgcccaatccactactttaggtccaaaactcatgtttggggtggtttcacgcaatttcgttgtcgcacgtcacccattccgaaaacgggtgtcaggtgcatacaaagcacgagtttttgccaccggaaccatttcttcgttttttgcaacgaacatgcccaatccactactttaggtccaaaactcatgtttggggtggtttcgcgcaatttcgttgtcgcacgtcacacattccgaaaacgggtgtcggggtgcatacaaagcacgagtttttgtcagcggaaccatttcttcgtttttcgcaacgaacatgcccaatccactactttaggtccaaaactcatgtttggggtggtttcgcgcaatttcgttgtcgcacgtcacccattccgaaaacgggtgtcgggtgcatacaaagcccgagtttttgccaccggaaccatttcttcgttttttgcaacgaacatgcccaatccactactttaggtccaaaactcatgtttggggtggtttcgcgcaatttcgttgtcgcacgtcacacattccgaaaacgggttgtcggggtgcatacaaagcacgagtttttgccaccggaaccatttcttcgtttttcgcaacgaacatgctcaatccactactttaggtccaaaactcatgtttgaggtggtttcgcgcaattttgttgtcgcacgtcacacattccgaaaacgggtgtcggggtgcatacaaagcacgagtttttgtcagcggaaccatttcttcgtttttcgcaacgaacatgcccaatccactactttaggtccaaaactcatgtttgaggtggtttcgcgcaatttcgttgtcgcacgtcacccattctgaaaacaggtatcgaggtgcataaaagcacgagtttttgccaccggaaccatttcttcgtttttcgcaacgaacatgcccaatgatgtgcacccgttgggtgattgcccgatctttcgatgagagggtgtggaataactcgattgggggaggagacgacgttcacggcccgactacagccttccaaagacgctgcgccttagcaaccgatacaccacctgctatggctgtcacgatcttgtggagcgtgacaccctggccactagggcactcgtcctgcaagcaatcgaagaactagcaagaacaagtactgaattaccagatctaaatgtaggtttcaaagtcaaactccaatatggtggggttccgaagacaagaagacgggcggctgaactagcacgcgcgcttgcaagcaagtagcgagagctaaacttgatctaaacaaaacccgctgttcttggtggcggctagggggtctataaacatgggaggacgaccacaagggtattggggtcgtgctgcaaccctaggatgcgtccctaatggacctaacttgatacacgacccattgggccaaaatagggtgacgcagcaccatgggcagaaaaggcagaaaatatctcggtaagaaaacaatgattacggcggcctcagaacagatatgactataattccggatccatatgaaagtagacttgataagctttccatgttgtgcttgaacattccaatccgagcccgcatctgaccgtggtgaccttcacaagttggtgttcttctgcagtccgaatccagcatgttcaaatcctatttccctttcgatcttctccctggttcctaagcaaaacaagagtgcacgggtctccatggtctaaatatgatggacatgatctcaagagtgtaatcacctgatggttgagttgacgagcacgagcgcgagtaatgggaccagaaattggtacttgtattggcatagatgtatcagtagtgtggatgtcttcatcagttgccttctcaaattctagatggtttacctcccaaacaccttagcataataaagtaatcacaaggtattaatacctcatttaaggaatgattagcttcaacaacacggaacgagttcacctgatgattaaatttacgtgcacggactcgtttcactggtccatgattaaatggtgaagggggtcgctggtgtggttgtattgatggcagtgatgtcctcatcagaacatgcccaatccactactttaggtccaaaactcacgtttgcggtggtttcgcacaatttcgttgccgcaagtcacccattccgaaaacgggtgttgggtgcatacaagcacgagtttttgccaccagaaccatttcttcgtttttcgcaacgagcatgcccaatccactactttaggtccaaaactcatgtgtggggtcgttgcgcataatttcgttgccgcatgtcacccattccgaaaacggatgtcggtgtgcatacaaagcacgcgtatttgccaccggaactatttctttgttttttcgcaatgaacatgccaatccactactttaggtccaaaaacatgtttggagtgctttcgtgcaattttgttgcgacacgtcaccaattccgaaaacgggtgtcgggatgcaaacaagcacgagtttttgccaccggaacaatttcttcgcttttttgcaacgaacatgcccaatccacaactttaggtccaaaactcacgtttgggtggtttcacgcaatttcgttgccgcacgtcacccattcagaaaacggatgacggggtgcatacaaagcacgagtttttgctaccgtaaccatttcttcatttttcacaacgaacatgcccaatccactactttaggtccaaaactcatgtttggggtggtttcgcacaatttcattgtcgcacgtcacccattccgaaaacgggtgttggggtgcatttgaagcacgagattttgccatcgaaaccatttcttcatttttggcaacgaacatgcccaatccactactttaggttcaaaactcatgtttggggtagtttcgcgcaattttgttgccgcacgtcacacattccgaaaacgggtgttgaggtgcattcaaagcacgagtttttgccaccggaaccatttcttcttttttcgcaacgaacatgcccaatccactactttaggtccaaaactctttgataaccccaacgggtagaagggtgcccgatctttcgatgagagatgatggaggtggaaaacttgttggagaacgacgttggctgcccgactaccacaaccaagatggtgtggcaccttgagcgacaggtacaccgtctcctaataactacgatttggggtggaggtcgacgttgtgctatccgactacaacaaccacaagggtgctgcgccttagcgatagttacaccggctcctgttgttgctgctcttgccgtgccaagaacagccttgaacctgcaagcaatcgagaacaagcaagaacaagataaaaagcagacactcacggatctgatagagttggggttctgtttcaagtatccgggtggtctagccgacacacgcgtttacaaggaagtagcaaaggctaaacttacatcaaacaaaaacccaagttctttggtggctgctagttgcttaaatagaggaatagaaagaagttctggtggagaacgaagctctctcgacagtttctggacgtgtcgtttggtttctcccattgattcttcagccgccagaaagtagacgaagagagctttccaacaagtacttatttgcactaaacaaccttaggagatgaaagatatgctccatttaatatggtgcttgctgcagttacgaattccctcggactggtggagtcaagaagttctctcgacagtttctggacgcctcatttggtatctctaattgattctttctccaccaagaagtagacgaagagtgctttccatcaagtgcttatttgccttcattggccttgggagttgaaagatatggcctcttcaacttgcacttgctgcagttacaaaatcccatcaagtggagcagcttttattgccttgttgacttctcanaat

SEQ ID NO: 243 - DNA, 742 bp, Zea mays
  source (0)...(0): Zea mays BAC clone full insert sequence contig bacb.pk243.l15.fis1
  misc_feature (1)...(742): n = A,T,C or G
ngacccgtatannnnnnnnnnnnnnnnnnnnnnnnnnnnnnnnnnnnnnnnnnnnnnnnnnnnnnnnnnnnnnnnnngcaaaagaggaactatggctcacatgttcagtgcttgtataattgtataatagaatctcattttcagctttacatgcaagcaaaaacaagtgagaaatgtgtttgtatgcttcatgcatgactatagtctgaatttcagaattgagtcctttcatgaacctagtcattacatcttccatgcattcatctaaacgagcaaacatggtacaaattttaaaatcatagtaataatctttcacagtcctagcaccctgctttaaggtgtctaatttagaaagcaaatgatcagcatagtatgcaggaatgaatgcatctctaaaatgaagtttgaagtcttcccaagattgtggaactttgttgtgcctacaaatgtatttccattccatcaatgcgtgctcagttaacaaattagaagcaatataaatcttttgtttttgagatagatcatgcttaccanattccttatctacctttagctcccaatcaatgtatgcatgangatcgaatttaccggtatatgaaggcaagtgtcgaatgatgccttgaatataatgttcggttggctcaaaaatctccatatcaactgccatgtttagtaaagacaagaaaaacattaaaatttctttggtcctattaactactaaggatcattggtggaaacccct

SEQ ID NO: 244 - DNA, 672 bp, Zea mays
  source (0)...(0): Zea mays BAC clone full insert sequence contig bacb.pk243.l15.fis2
  misc_feature (1)...(672): n = A,T,C or G
annnnnnnnnnnnnnnnnnnnnnnnnnnnnnnnnnnnnnnnnnnnnnnnnnnnnnnnnnnnnnnnnnnnnnnnnnnnnnnnnnnnnnnnnnnnnnnnnnnnnnnnnnngaacatgcccaatccactactttgggtccaaaactcatatttggtgtgttttcgcgcaatttcgttgtcgtacgtcacccattcccaaaacgggtgtcgaggtgcatacaaagcacgacttttgccaccggaaccaattcttcgtttttttgcaacaaacatgcccaatccacttctttaggtccaaaactcatgtttggggtggttccgcgctatttcgttgccgcacgtcacccattccgaaaacgggggtcggggtgcatacaaagcacgagtttttgccaccggaaccatttcttcgtttttgcaacgaacatgccccatccactactttaagtccaaaactcatgtttgggtttgtttcgcgccaatttcgttgccgcccgggaacccattccgaaaaaacggtggtccggggtggatacaaaacaaagaattttttcccccccggaaaaccttttccttcgtttttttcccaaaaaaaaatgggcccaaaaccaactaattttttagggtccccaaaaaacccattttttgtggggggggggtttttccccccccaaa

SEQ ID NO: 245 - DNA, 695 bp, Zea mays
  source (0)...(0): Zea mays BAC clone full insert sequence contig bacb.pk243.l15.fis3
  misc_feature (1)...(695): n = A,T,C or G
ngacccgtnnnnnnnnnnnnnnnnnnnnnnnnnnnnnnnnnnnnnnnnnnnnnnnnnnnnnnnnnnnnnnnnnnnnnctaaagtagtggattgggcatgtntcgttgcgaaaaacgaagaaatggtttcggtggcgaaaactcatgctttgtatgcatccgacacccgttttcggaattggtgacgtgcggcaacgaaattgcgcgaaaccaccccaaacatgagttttggacctaaagtagtggattgggcatgtttgttgcgaaaaacgaagaaatggttccggtggcgaaaactcgtgctttgtatccaccctgacacccgttttcggaatgggttccgtgcggcaacgaaattgcgcgaaaccaacccaaacatgagttttagacctaangtagtggattgggcatgttcgttgcaaaaacgaagaaatgggtccggtggcaaaactcgtgctttgtatgcaccccgacccccgttttcngaaatgggtgacgtgccggcaccaaatagccgcggacccaccccaacatgagtttttgacctaaagaaatgggatgggccttgtggttgcaaaaaaaccaaaaatggtttccggtgggcaaatccgtgctttgaagcccccccaaccccctttttggaatgggtaaccttcccaaaacaaaattgccgaaaaccccccaaaaaaggatttg

SEQ ID NO: 246 - DNA, 647 bp, Zea mays
  source (0)...(0): Zea mays BAC clone full insert sequence contig bacb.pk243.l15.fis4
  misc_feature (1)...(647): n = A,T,C or G
atcgccnnnnnnnnnnnnnnnnnnnnnnnnnnnnnnnnnnnnnnnnnnnnnnnnnnnnnnnnnnnnnnnnnnnnnnnnnnnnnnnnnnnnnnnnnnnnnnnnnnnnttgggtccaaaactaatgtttagtgtgttttcgcgcaatttcgttgtcgtatgtcacccattcccaaaacgggtgtcggggtgcatacaaagcacgacatttgccaccgaaaccaattcctcgtttttcgcaacgaacatgcccaatccacttctttaggtccaaaactcatgtttggtgtggtttcgcgctatttcgttaccgcacgtcacccattccgaaaacgggtgccggggtgcatacaaagcacgagtttttgccaccagaacgatttcttcgtttttcgcaacgaacatgcccaatccactactttaggtccaaaactcatgtttgggtgggtttcgcgcaatgtcgtttgccgcacgtcnaccccattccgaaaaacgggtgtcaaagttgggatacaaaaccaacgaagtttttcgcccacccggaaaaccaatttccctccgttttttttcgcaaacggaaaaaagggccccaaatcccaacctaacttttaagggtcccaaaaaacaccccaagggtttttgtggggggg

SEQ ID NO: 247 - DNA, 791 bp, Zea mays
  source (0)...(0): Zea mays BAC clone full insert sequence contig bacb.pk243.l15.fis5
  misc_feature (1)...(791): n = A,T,C or G
aacgcatnnnnnnnnnnnnnnnnnnnnnnnnnnnnnnnnnnnnnnnnnnnnnnnnnnnnnnnnnnnnnnnnnnnnnnnnnnnnnnnnnnnnnnnnnnnnnnnnnnnnncatctcctgtttgatcacgccacaaaaccgagtcaagatcgttttccttgtttttctccttcagttacgtaaaaaaacagaaaaaacaaaccgagtcaacggtcgtttccttgtttttctccttcggttacgaaaaaaacagaaaaaaaaaacaaaccgagtcaacggccgcttccttgtttttctccttcggttacgtcaaaaaaaaacagaaacaaaaaaaaagaaaacgaaggagaaaggatacggttgtttcatcccggtcgttttaaaacataacttgaggtaccttccgtaaaacgggcataactttttcgctcgggtgtccaaaaaatctgaaatttttacaggagcttgttgacaccattctgaggccggccaaactcacctacggtctgtttgggtttcgacaaaattgtcaaaaaaaattcaggaaaataaagaaaaaaattcatcaaagttctcgcacgcttttcagagaacttcctgattttctgtagaccacatctgaactctgtgttaggtgaaacttcgtgtagcttctattttgttgcttcttgtactgagaaaaatatcaaaaaaatcatacaaaaaaagaaaaacaaaatcacttgtgattcctactagtggcctcgctagtacaatatttacggtactgccattctgctagttccatttgtcct

SEQ ID NO: 248 - DNA, 795 bp, Zea mays
  source (0)...(0): Zea mays BAC clone full insert sequence contig bacb.pk243.l15.fis6
  misc_feature (1)...(795): n = A,T,C or G
nnnnnnnnnnnnnnnnnnnnnnnnnnnnnnnnnnnnnnnnnnnnnnnnnnnnnnnnnnnnnnnnnnnnnnnnnnnnnnnnnnnnnnnnnnnnnnnnnnnnnnnnnnnnnggtccaaaactcatgtttggggtggtttcgcgcaatttcgttgccgcacgtcaccgattccgagaacgggtgtcggggtgcacatgagttttcgccaccggaaccatttcttcatttttcgcaacgaacatgcccaatccactactttaggtccaaaactcatgtttgggtggtttcgcgcaatttcgttgccgcacgtcacccattccgaataccggtgtcggggtgcatacaaaacacgagtttttgccaccggaaccatttcttcctttttcgcaacgaacatgcccaatccactactttaggtccaaaactcatgtttggggtggtttcgcgcaatttcgttgtcatacgtcaccccattcccaaaacgggtgtcggggtgcatacaaagcacgagtttttgccaccggaaccatttcttcgtttttcgcaacgaacatgcccaatccactactttaggtccaaaactcatgtttggggtggtttcgcgcaatttcgttgtcatacgtcaccccattcccaaaacgggtgtcggggtgcatacaaagcacgagttttcgccaccggaactattcttcgtttttcgcacgaaattggctaatccactgctttaggcccaaaactcatgtttggggtggttttcgngcatatgttccccatttcaaaaagggtgggagggtggt

SEQ ID NO: 249 - DNA, 792 bp, Zea mays
  source (0)...(0): Zea mays BAC clone full insert sequence contig bacb.pk243.l15.fis7
  misc_feature (1)...(792): n = A,T,C or G
atcgccnnnnnnnnnnnnnnnnnnnnnnnnnnnnnnnnnnnnnnnnnnnnnnnnnnnnnnnnnnnnnnnnnnnnnnnnnnnnnnnnnnnnnnnnnnnnnnnnnnnnnncatgagttttggacctaaagtagtggaatgggtatgttcgttgtgaaaaacgaagaaatggttccggtggcaaaaactcgtgcttgtatgcaccccgatacccgttttcggaatgggtaacgtgcggcaacgaaattgcgcgaaaccacccaaacatgagttttggacctaaaatagtggattgggcatgttcgttgggaaaaatgaagaaatagttccggtggcaaaaactcgtgctttgtatgcaccccaacacccgttttcggaatgggtgacgtgcggcaaccaaattgcgcgaaaccacccccaacatgaattttggaccttaaataatggattggcatgttcgttgcgaaaaaacaagaaatgggtccggtggcaaaaactcctgctttgtatgcacccccacacccgattttggaaagggtgacgtgtgggcccaaaactcccctgaaaccactattcggattgacattgtggatttggcaagttagttgcgaaaaaccaagaactggctcccgtggcgagaactcgtgcgttgtatgcaccccgacagccggcttagggatgagggtgacgtaggaatactaaattgctcgaaaactaccccaaacatgatttcaggaacctaaagtaggggactgggcatggtccttgccaaaaacaaaaaaataggctccgggg

SEQ ID NO: 250 - DNA, 712 bp, Zea mays
  source (0)...(0): Zea mays BAC clone full insert sequence contig bacb.pk243.l15.fis8
  misc_feature (1)...(712): n = A,T,C or G
nggacnnnnnnnnnnnnnnnnnnnnnnnnnnnnnnnnnnnnnnnnnnnnnnnnnnnnnnnnnnnnnnnnnnnnnnnnnnnnnnnnttggctcaaaaatctccatatcacctgccatgttcagtaaagacaagaaaacaataaaaatatctttgatcctataaactactaggaatcattgttgtaatctctcattctcaaactggttaagcaagttcttacaaattctcaccacgcaatacaggaggtgccggcaaacagcaagaacaacaacaacggtggcagctagcacaacctggtggtgttgtagaaaaatttgtggatttataggtagctgcaatttcaatagttccaagaaatagctagtaccacgttagtcacaacaagttgaataaacgttctacaatggtgttgtgctggttctagtccaaaccgtaatagagacgcgagccgttacacaaatagtatcaccaaaaggtcagaacatcaatcggatttctgaaactantaaaaagaagcacaccaaactgccctttttgtttttgttggcaccttacaaaatttttatctacccaaaaaattcgaaacgggggttttttccccccccctttttttttggccccggggccctttttttttttgttttgggggaaaaaaaaggccggccttttttttaaagccaccccgcccccttttttggggttttcccccctt

SEQ ID NO: 251 - DNA, 802 bp, Zea mays
  source (0)...(0): Zea mays BAC clone full insert sequence contig bacb.pk243.l15.fis9
  misc_feature (1)...(802): n = A,T,C or G
nnnnnnnnnnnnnnnnnnnnnnnnnnnnnnnnnnnnnnnnnnnnnnnnnnnnnnnnnnnnnnnnnnnnnnnnnnnnnnnnnnnnnnnnnnnnnnnnnnnnnnnnnaattgcgcgaaaccaccccaaacttgagttttggacctaaagtagtggattcggcatgttcgttgcgaaaaacgaagaaatggttccggtggcaaaaactcgtgcttgtatgcaccccgacacccgttttcggaattggtgacgtgcggcaacgaaattgcgcgaaaccaccccaaacatgagttttggacctaaagtagtggattgggcaagttcgttgcgaaaaacgaagaattggttccggtggcgaaacctcaagctttgtatgcaccccgacacccgttttcgaaatgggtgacgtgcggcaacgaaattgcgcaaaaccaccccaaacatgagttttggacctaaagtagtggaatgggaatgttcgttgtgaaaaactatgaaatggttccggtggcaaaaactcgtgcttgtatgcaccctaacaatcgtttttggaatgggtaacgtgcggcaacgaaattgcgcgaaaccaacccaaacatgagttttgtacctaaagtaatggattgggtatgttcgttgacaaaaacgaagaaatggttccggtgggcaaaactcgtgctttgtatgcaccccaacacccgttttttgaaagcgtgacgtccggcaacaaaattgcgcgaaaacaccccaaaaatgagttttggaacctaaagaactggaatgggcatgttcctttgccaaaaac

SEQ ID NO: 252 - DNA, 733 bp, Zea mays
  source (0)...(0): Zea mays BAC clone full insert sequence contig bacb.pk243.l15.fis10
  misc_feature (1)...(733): n = A,T,C or G
atcgccnnnnnnnnnnnnnnnnnnnnnnnnnnnnnnnnnnnnnnnnnnnnnnnnnnnnnnnnnnnnnnnnnnnnnnnnnnnnnnnnnnnnnnnnnnnnnnnnnnncatttctaaggttgtctattgtctcatggcaagtgcttagctcactagataatttttcacatttttcaatttctagagcataagcatttttaaccttaatgatgtgcacccgttgggtgattgcccgatctttcgatgagagggtgtggaataactcgattgggggagaagacgacgttcacggcccgactacagccttcccaagacgctgcgccttagcaaccgatacaccacctcctatgtctgtcacgatcttgtggggcgtgacaccctggccactagggcactcgtcctgcaagcaatcgaagaactagcaagaacaagtagaacaagtactgaattaccagatctaaatgtaggtttcaaaatcaaactccaatatggtggggttccgaagacaagaagacggacggctgactagcacgcgcgcttacaagcaagtagcgagagctaaacttgatctaaacaaaacccgcctgttcttggtggcggctaggggggtctataaacatgggaggacgaccacaagggtattggggtcgtgctgaaaccctaggatgcgtccctaatggacctaacttgatacacgacccattgggccaaaatanggtgacgcagcaccatgggc

SEQ ID NO: 253 - DNA, 696 bp, Zea mays
  source (0)...(0): Zea mays BAC clone full insert sequence contig bacb.pk243.l15.fis11
  misc_feature (1)...(696): n = A,T,C or G
tgacgcgcgtatacgactcctataggggcgattgggnccttactcgccgctcgagtcgacggtancttcagcttgatttgtatgcacccgacacccgttttcggaatgggtgacgtgcggcaacgaaattgcgcgaaaccaccccaaacacgagttttggacctaaagtagtggattggacttgttcgctgcgaaaaacgaagaaatggttccggtggcgaaaagtcatgctttgtatgcacccgacacccgttttcggaatgggtaacgtgcggcaacgaaattgcgcgaaagcaccccaaacatgagttttggacctaaagtagtgtattgagcatgttcgttgagaaaaacgaagaaatggttccagtggcgaaaactcgtgctttgtatgcaccccgacaccggttttcggaatgggtgacgtgcggcaacgaaattgcgcgaaaccaccccaaacatgagttttggacccaaagtagtggattgggcatgttcgttgcgaaaaacgaagaaatggttccggtggcgaaaactcgtgcttttaatgcacccgactaccgttttcggaatgggtgacgtgcggcaacgaaattgcgcgaaaccccccaaacgggatttttggacctaaatattcgaatggggatgtttgttgcgaaaaatgaaaaatggtttcggtggggaaaactcttggtt

SEQ ID NO: 254 - DNA, 728 bp, Zea mays
  source (0)...(0): Zea mays BAC clone full insert sequence contig bacb.pk243.l15.fis12
  misc_feature (1)...(728): n = A,T,C or G
ngacccgtnnnnnnnnnnnnnnnnnnnnnnnnnnnnnnnnnnnnnnnnnnnnnnnnnnnnnnnnntttcagcttngatgnanngcgaaaccncancnanntnncnanananncatgagttttggacataaagtagtggattgggcatgttcgttgcgaaaaacgaagaatgggttccggtggcaaaagttgtgctttgtattcacccagacacccgttttgggaatgggtgacgtgcggcaacgaaattgcgcgaaaccacgcaaacatgagttttggatctaaagtagtggaatangaaatgtcgttggcgaaaaatgaagaaatggtcccagtggcgaaaagtcatgcttttgggtgcccctcgacacccgtttttttggagataaatgaactgcccccaccaaaattggccgaaacccccccaaaatggatttttggaccaaagaattggattgggccattttcctttaaaaaaaaaaaaaaaagttttcggggaaaaaaacctcgcctttttttgccccccaaccccccttttttagaagggggggggtgggggcccaaaattttaaattttcctccgccccggggggaccccattttttataaggcggccccccccccggggggaccccccctttttttctcctttaaaaagagataattgcccccgggggaaaaaaaagggaaaaaattttttccgggggaaaaattccctcccccccaacc

SEQ ID NO: 255 - DNA, 789 bp, Zea mays
  source (0)...(0): Zea mays BAC clone full insert sequence contig bacb.pk243.l15.fis13
  misc_feature (1)...(789): n = A,T,C or G
ngannnnnnnnnnnnnnnnnnnnnnnnnnnnnnnnnnnnnnnnnnnnnnnnnnnnnnnnnnnnnnnnnnnnnnnnnnnnnnnacccattccactactttaggtccaaaactcatgtgttggggtggttttgcgcaatttcgttgccgcacgtcacccattccgaaaacgggtgtcggggtgcatacaaaggttgagttttcgccaccagaaccatttcttcgtttttcccaacgaacatgcccaatccactactttaagtccaaaactcatgtttggtgtggtttcacgcaatttcgttgccgcacgttacccattccgaaaacgggtgtcggggtgcatacaaacacgagtttttgccaccggaaccatttcctcgtttttcacaacgaacatacccattccactactttaagtccaaaactcaagttttggggtggttttgcgcaatttctttgccgcacgtcacccattccaaaaacgggtgtccgggtgcatacaaaaaacgaatttttcccaccggaaccattttctttgtttttcccaacaaaaaggcccaatcccctaatttatgtccaaaactcaatatttggggtgggtttcccacaaattccttgacggcacgtaacaccattccaaaaacggtttcggggggcaaagaaacccccagatattccccaccggaacatattccttcatttttcccaacacacaaccccccaacataacaaattaaggcgccaaaaaacccctctttgggggcggttttgtgcggattattggggcggggg

SEQ ID NO: 256 - DNA, 766 bp, Zea mays
  source (0)...(0): Zea mays BAC clone full insert sequence contig bacb.pk243.l15.fis14
  misc_feature (1)...(766): n = A,T,C or G
atccnnnnnnnnnnnnnnnnnnnnnnnnnnnnnnnnnnnnnnnnnnnnnnnnnnnnnnnnnnnnnnnnnnnnnnnnnnnnnnnnnnnnnnnnnnnnnnnnnnntgcatagaatttctatttcatctagatatgttgtttcttcactttgtgcaaataatatattggtatgttctcaagaagaaaagaatctcttgtttccatgtactttagtagaagtttcaggtttatatttgaaagacattaataaaagcttagtcatcaacatcaatcatgatgcaaaaccaaggacggtttgctgtcaagaaggagagaatgatgagaacataacccgcacagatatgaccatgttaatggctcctgctacagagacattgaggaacaaagaagttgattggggaccaagtaatgatatttccaacatttccaacaaagcaagcacatcatcaaatttgaagatatacttgggtgaggagcatacactagagtcgaggacgactctattacaagaaggggaggatgatgaagacatcactggcatcaatacaccacaccagcgacccccttcaccatttaatcatggaccagtgaaacgagtccgtgaacgtaaatttaattatcaggtgaactcgttccttgttgttgaagctaatcattccttaaatgaggtactaataccttatgattactttattatgctaaggtgtttgggaagtgaacatctagaatttgagaaaagcacagggcaataaagctgctccanttgag

SEQ ID NO: 257 - DNA, 572 bp, Zea mays
  source (0)...(0): Zea mays BAC clone full insert sequence contig bacb.pk243.l15.fis15
  misc_feature (1)...(572): n = A,T,C or G
atacccnnnnnnnnnnnnnnnnnnnnnnnnnnnnnnnnnnnnnnnnnnnnnnnnnnnnnnnnnnnnnnnnnnnnnnnnnnnnnnnnnnnnnnnnnnnnnnnnnnnatttcgttgcctcacgtcacccattccgaaaacgggtgtcggggtgcacataaagcacgagttctttccaccagaaccatttcttcgtttttctcaacgaacatgcccaatccactactttaggtccaaaactcatgtttggggtggtttcgcgcaatttcgttgcggcacgtcacttattccaaaaaacgggtgtcgaggtgcacacaaagcatgacttttcgccactggaaccatttcttcatttttcgcaacgaacattcctaatccactactttagatccaaaactcatgtttggcgtggtttcgcgcaatttcgttgccgcacgtcacccattcccaaaacgggtgtctgggtgaatacaaagcacaacttttgccaccggaacccattcttcgtttttcgcaacgaacatgcccaatccactactttatgtccaaaactcatgtttgatgtggtttcgctc

SEQ ID NO: 258 - DNA, 778 bp, Zea mays
  source (0)...(0): Zea mays BAC clone full insert sequence contig bacb.pk243.l15.fis16
  misc_feature (1)...(778): n = A,T,C or G
tcgccnnnnnnnnnnnnnnnnnnnnnnnnnnnnnnnnnnnnnnnnnnnnnnnnnnnnnnnnnnnnnnnnnnnnnnnnnnnnnnnnnnnnnnnnnnnnnnnnnnnnnagcatattcaaataaagtagtcatatcataatattccttataatcaagtatatcctggatttcgcggtttaaaccaccacgaaaatgtgccgtagcagcgtcgttgtcctccaatatcccacaacgagtcatacctttttgtaactcctggaaatactcctcaacagattgagaaccttgctgaaaacgcttcattttattaagcaaatcacgagcataatatgaaggcacaaatcgatgtcgcatcgcagctttcaactgatcccaagtggttggaatggcagtgggatgttttattttatactcacgccaccaaattaaagcaaaatcagtaaattcactaatagcagctttaatctgagaatgtgcagcaatatcatggcatgaaaatttttgttcaacctctaactcccaatcaagatatgcagcaggatcatatttgccatgaaaaggtggaattttaaatttaatcttagaaaataagtcattagggggatgacgaaccacacggcatgcacgaccatggcgatctccatcgtcttgctcagtgtcaccgccgtagtcctgctccatctttgtggtcaacgcatcaaggcgtgccaggatggtgtcgagtgtggtgcgagtcgccgtttgagcaaggtcaagctggttgaaacgctcgatcgtcga

SEQ ID NO: 259 - DNA, 786 bp, Zea mays
  source (0)...(0): Zea mays BAC clone full insert sequence contig bacb.pk243.l15.fis17
  misc_feature (1)...(786): n = A,T,C or G
ngannnnnnnnnnnnnnnnnnnnnnnnnnnnnnnnnnnnnnnnnnnnnnnnnnnnnnnnnnnnnnnnnnnnnnnnnnnnntacgtcaccccattcccaaaacgggtgtcggggtgcatacaaagcacgagtttttgccaccggaaccatttcttcgtttttcgcaacgaacatgcccaatccactactttaggtccaaaactcatgtttggggtggtttcgcgcaatttcgttgtcatacgtcaccccattcccaaaacgggtgtcggggtgcatacaaagcacgagtttttgccaccggaaccaattcttcgtttttcgcaacgaacttggcaaatccactgctttaggtccaatactcatgtttggggtggtttcgtgccatacgtcacccattccgaaaacgggtgtcggggtgcatacaaagcacgagtttttgcgaccggaaccatttcttcgtttttcgcaacgaacatgccaatccattactttaggtccaaaacatatgtttggggtgggttcccgcaaattctttgccgcacgtcaccccttccgaaaaagggtgttggggggctttccaagaacgagtatttgcccccggaacaatttcttcattttttccaagaaaatgcccaatccaataactttaggtgccaaaattagttgttaggggggggtttctcgccaattatcgttggcccccgtgttaaccccatcttaaaaaggggtgatcgggggtgcataacaaaccggacgttgttggctatctcgaacctttattctctcc

SEQ ID NO: 260 - DNA, 599 bp, Zea mays
  source (0)...(0): Zea mays BAC clone full insert sequence contig bacb.pk243.l15.fis18
  misc_feature (1)...(599): n = A,T,C or G
ngacnnnnnnnnnnnnnnnnnnnnnnnnnnnnnnnnnnnttctttaagctgcgnnnnnnnnnnnnnnnnnnnnnnnnnnnnntttgtgtgctttcgcgtcatttgttgctggttgcattgtgttcttccaccattcaaaccctagcgccgccaccatctcccctttgcgagtcaacatcgtttccttgtttttctccttcggttacgtcaaaaaaaaacagaaaaaacaaaccgagtcaacgggccgttttccttggttttttcccccttcgggtttccaaaaaaaaaaaaccggaaaaaaaaaaaccaaccccgagtcccaaaatttgggtttcccctggggtttttttccccccctccgggggttaaaccccccccaaaaaaaaaaaaccccgggaaaccccccaaaaaaacacccccccccccaaggggggaaaaaaaagggggccaacccgggggttgttttttatttccacccccccggggggttgtttttttaaaaaaaaaaaaaaaaaaatgtggggggggggggcccccccctttttttaaaaaaaaaggggggggggggaaaaaaaattttttttttctggcggcggggg

SEQ ID NO: 261 - DNA, 772 bp, Zea mays
  source (0)...(0): Zea mays BAC clone full insert sequence contig bacb.pk243.l15.fis19
  misc_feature (1)...(772): n = A,T,C or G
tgacgccgtnnnnnnnnnnnnnnnnnnnnnnnnnnnnnnnnnnnnnnnnnnnnnnnnnnnnnnnnnnnnnnnnnnnntggacctaaagtagtggattggacttgttcgctgcgaaaaacgaagaaatggttccggtggcgaaaagtcatgctttgtatgcacccgacacccgctttcggaatgggtaacgtgcggcaacgaaattgcgcgaaaccaccccaaacatgagttttggacctaaagtagtggattgggcatgttcgttgagaaaaacgaagaaatggttccaatggcgaaaactcgtgctttgtatgcaccctgacaccagctttcggaatgggtgacgtgcggcaacgaaattgcgcgaaaccaccccaaacataagttttggacctaaagtagtggattgggcatgttcgttgcgaaaaacgaagaaatggttttggtggcaaaaactcgtgctttgtatgcaccccgacacccgttttcggaatgggtgacgtgcggcaacgaaatagtgcgaaacccaccaaacatgagttttggacctaaagtagtggattgggcatgttcgttgcgaaaaacgaagaaatggttccggtggcgaaaactcatgctttgtatgcatccgacacccgttttccgaattggtgacctgcggcaaccaaattgcgcgaaacacccccaaaattgagttttggacctaaaattattggattgggcatgttttgttgccaaaaaagaagaaaattggttcctggtggcgaaaacc

SEQ ID NO: 262 - DNA, 668 bp, Zea mays
  source (0)...(0): Zea mays BAC clone full insert sequence contig bacb.pk243.l15.fis20
caccggaaccatttcttcatttttcgcaacgaacatgcccaatccactactttaggtccaaaactcatgtttgggtggtttcgcgcaatttcgttgccgcacgtcacccattccgaatacgggtgtcggggtgcataaaagcacgagtttttgccaccggaaccatttcttcgtttttcgcaacgaacatgcccaatccactactttaggtccaaaactcatgtttggggtggtttcgctcaatttcgttgtcgtacgtcaccccattcccaaaacgggtgtcggggtgcatacaaagcacgagtttttgccaccggaaccaattcttcgtttttcgcaacgaacttgcccaatccactgctttaggtccaatactcatgtttggggtggtttcgtaccacacgtcacccattccgaaaacgggtgtcggggtgcatacaaagcacgagtttttgccaccggaaccatttcttcgtttttcgcaacgaacatgccaatccattactttaggtccaaaactcatgtttgcggtgatttctgcgcaatttcgttgccgcacgtcacccattccgaaaacgggtgtcggggtgcatacaaagcttgagtttttgccaccggaaccatttcttcgtttttcgcaatgaacatgcccaatccactactttagg

SEQ ID NO: 263 - DNA, 700 bp, Zea mays
  source (0)...(0): Zea mays BAC clone full insert sequence contig bacb.pk243.l15.fis21
gtgctcgtcaactcaaccatcaggtgcttacactcttgaatgcatgtccatcatatttagaccatggagacccgtgcactcttgttttgcttaggaaccagggagaagaccgaaagggaaaaggatttgaacatgctggattcggactgcagaagaacaccaaattgtgacggtcaccacggtcacatgcgggctcggattggaatgttcaagcacaacatggaaagcctatcaagtctactttcatatggatccggaattatagtcatatctgttctgaggccgccgtaatcattgtttccttacagagacatttcctgccttttctgcccatggtgctgtgtgaccctattttggcccaatgggtcgtgtatcaagttgggtccattagggacgcatcctagggttgcagcacgacccaaatacccttgtggtcgtcctcccatgtttataaaccccctagccgccaccaagaacagcgggtttttttagatcaagtttagctctcgctacttgcttgtaagcgcgcgtgctggttcagccgcccgtcttcttgtcttcggaaccccaccatattggagtttgattttgaaacctgcatttagatctggtaattcagtacttgttctacttgttcttgctagttcttcgattgcttgtaggacgagtgccctagtggccagggtgtcacgctccacaa

SEQ ID NO: 264 - DNA, 1075 bp, Zea mays
  source (0)...(0): Zea mays BAC clone full insert sequence contig bacb.pk243.l15.fis22
cgcaatttcgttgccgcacgttacccattccgaaaacgggtgtcggggtgcatacaagcacgagtttttgctaccggaaccgtttcttcgtttttcgcaacaaacatgcccaatccactactttaggtccaaaactcatgtttggggtggtttcgcgcaatttcgttgccgcacgtcacccattccgaaaacgggtgtcggatgcatgcaaagcatgagttttcgccaccggaaccatttcttcgtttttcgcaatgaacattcccaattgactactttaggtccaaaaatcatgtttggggtggtttcgcgcaatttcgttgccgcacgtcacccatccccaaaacggtagtcggggtgcattaaaagcatgagttttcgccaccggaaccacttcttcatttttcgcaacgaccatgcccaatccacaactttgggtccaaaactcatgtttggggtggtttcgcgcaatttcgttgccgcacgtcacccattccgaaaaccggtgtcggggtgcatacaaagcatgagttttcgccaccggaaccatttcttcgtttttcgcagcaaacaagcctaatccactactttaggtccaaaactcatgtttggggtggtttcccgcaatttcgatgccgcacgtcacccattccaaaaacgggtgtcgggtgcatacaaatcatgagttttcgccaccggaaccatttcttcgtttttcgcaacaaacatgcccaatccactactttaggtccaaaactcatgtttggggtggtttcgcgcaatttcgttgccgcacgtcacccattccgaaaacggtagtgggggtgcatacaaagcatgagttttcgccaccggaaccatttcttcgtttttcacaacgaacatgcccaatccactactttgggtccaaaactcatgtttggtgggttttcgcacaatttcgttgtcgtacgtcacccattcccaaaacgggtgtcggggtgcatacaaagcacgacttttgccaccggaaccaattcttcgtttttcgcaacgaacatgcccaatccacttctttaggtccaaaactcctgtt

SEQ ID NO: 265 - DNA, 872 bp, Zea mays
  source (0)...(0): Zea mays BAC clone full insert sequence contig bacb.pk243.l15.fis23
caacgaacatgcccaatccacttctttaggtccaaaactcctgtttgggctggttccgcgctatttcgttgccgcacgtcacccattccgaaaacgggggtcgaggtgcatacaaagcacgagtttttgccaccggaaccatttcttcgttttttgcaacgaacatgcccaatccactactttaggtccaaaactcatgtttgggttggtttcgcgcaatttcgttgccgcacggaacccattccgaaaacgggtgtcagggtggatacaaagcacgagttttcgccaccggaaccatttcttcgtttttcgcaatgaacatgcccaatccactactttaggtccaaaactcatgtttggggtggtttcgcgcaattttattgccgcacgtcacccattccgaaaacgggtgtcggggtgcatacaaaccacgagtttttgccacccggaaccatttcttcgttttcgcaacgaacatgcccaatccactactttgggtccaaaactcatgtttggtgtggtttcgcgctatatcgttgccgcacgtcacccattccgaaaacgggtgtcggggtgcatacaaagcatgagtttttgccaccggaaccatttcttcgtttttcgcaacgaacatgcccattccagtactttaggtccaaaactcatgtttggggtggtttcgcgcaacttcgttgccggacgtcacgcgttccaaaaacgggtgttggggtgcatacaaagcacgagtttttgccaccggaaccatttcttcgtttttctcaacgaacatacccaatccactactttaggtacaaaactcatgtttgggttggtttcgcgcaatttcgttgccgcacgttacccattccaaa

SEQ ID NO: 266 - DNA, 1007 bp, Zea mays
  source (0)...(0): Zea mays BAC clone full insert sequence contig bacb.pk243.l15.fis24
  misc_feature (1)...(1007): n = A,T,C or G
ctactagtgagtttactgaatttgcttctgtttggtggatagaacatggtaagaagaatcctaataacatgccacaaacttgggatgcgttgaaacgggtcatgcgggctagatttgtcccttcttattatgcacgtgatatgctaaacaagttgcaacaattgagacagggtactaaaagtgtagaagaatattatcaggaattacaaatgggtatgctgcgttgtaacatagaggagggtgaggaatctgctatggctagatttttgggcgggttaaatagggaattcaggacatcattgcttataaagattatgctaatgtaacccgattgtttcatcttgcttgcaaagctgaaagggaagtgcagggacgacgtgctagtgcaaggtctaatgtttctgcaggaaaatctacaccatggcaacagcgcacgactacgtccatgaccggccgtacaccagcaccaactccctcgtcaagtcgaccagcaccaccgccttcctccggcgacaaaccacgtgcatcttccacaaattcagcaaccaaatctgcccagaaaccagcaggtagtgccttttcagtagcctccacgggtagaacaagagatgttctgtgttatcgatgcaagggctatggacacgtgcagcgtgattgtcctaatcagcgtgttttggtggtaaaagatgatggtgggtatttctctgctagtgatttggatgaagctacacttgctttgtttgcngctgatgattgcagccctaaagaacaccccgaaaaaaaatttggggccaattatcccaaacccttttaaaaccccctttttaaaaccttgtgcttttggcccaattgggaaaggcggaaaaaaaacccccgccaccctttttttttaaaaaaagggtggtttaaaaaaacaccccgccttgtaaccctgggggaggggcgcccaaaattttttgttacccccacggggggaaaaattttttttttaaaaaaccccccccccc

SEQ ID NO: 267 - DNA, 973 bp, Zea mays
  source (0)...(0): Zea mays BAC clone full insert sequence contig bacb.pk243.l15.fis25
cgtgaaaccacctcaaacatgagttttggtcctaaaatagtggattgggcatgttcgttgagaaaaacgaagaaatggttccggtggcgaaaactcatgctgtgtatgcaccccgacacccgttttcggaatgggtgacgtgcggcaacgaaattgcgcgaaaccaccccaaacatgatttttggacctaaagtagtggattgggcatgttcgttgcgaaaaacgaagaaatggttccggtggcgaaaactcatgctttgtatgcaccccaactcccgttttcggaatgggtgacgtgcggcaaagaaattgtgcgaaaccaccccaaacatgagttttagacctaaagtagtggattgggcatgttcgttgcgaaaaacgaagaaatggttctggtggcgaaaactcttgctttgtatgcaccccgacacccgttttcggaatgggtgacatgcatcaacgaaattgcgcgaaaccaccccaaacatgagttttcgacctaaagtagtggattgggcatgttcgttgcgaaaaacgaagaaaatggtcccggtggagctttgtatgcaccccgacacccgttttgggaatggggtgacgtatgacaacgaaattgcgcgaaaccaccccaaacatgagttttggacctaaagtagtggattgggcatgttcgttgcgaaaaacgaagaaatggttccggtggcaaaaactcgtgttttgtatgcaccccgacacccgtattcggaatgggtgacgtgcggcaacgaaattgcgcgaaaccacccaaacatgagttttggacctaaagtagtggattgggcatgttcgttgcgaaaaatgaagaaatggttccggtggcgaaaactgatgtgcaccccgacacccgttctcggaatcggtgacgtgcggcaacgaaattgcgcgaaaccaccccaaacatgagttttggacctagaatagttgattggacatg

SEQ ID NO: 268 - DNA, 1058 bp, Zea mays
  source (0)...(0): Zea mays BAC clone full insert sequence contig bacb.pk243.l15.fis26
atccaccgtgtcgtgtgctcctgccatggttagcgcaaacaccaaaacaccaaaaggagaaaaaccgacgacaacagggaaatggtggtgacaactcgctcaatggaatgctgttatcaagttcttatccgttcttaccaagccacagtggtgaactgcaaccaacaggtggaaccggtgaaagattggatgagcgattgcctggagaaacagaaaccttctcgtcgtagaaatatgtggagttttgggtaggctgcactcaactcaaggattagcacaatcaaaaaataatgcaaagttgaattatagtgcaaaacacgaaactatattactggccacaagtgcaaaggacggatggaactagcagaatggcagtaccgtaaatattgtactagcgaggccaaaaaggcactagtatgaatcacaggtgattttgtttttcttttttgtatgatttttttaatatttttctcagcacaaggagcaacaaaataggagctacacgaagtttcacctaaaaaagagttcagatgtggtctatagaaaattaggaagttctccgaaaagcgtgcgagatctttgacgatttttttctttattttcctgaattttttgacaattttatcgaaaccaaacaggccgtaggcgagtttggccggcctcagaatggtgtcaacaagcttctgtaaaaatttcagattttttgaacaaccgagtgaaaagttatgcccggtttaaggaaggtatgtaaaaatcaggaagttgtatcctttctccttcgttttttttgtttctgttttttttacgtaaccgaaggagaaaaacaaggaagcggcgttgactcggtttgtttttttctgtttttttacgtaaccgaaggagaaaaataaggaagcggcgttgactcggtttgtggcgtgatcaaacggaatatggtggcggcgcgctagggtttgaatggtggaataacacaatgcaaccagcaacaaatgacgtgaaagcacacaaattcaacaatgcagattattgaaagaaagtgcgagggctcaaaaggtgct

SEQ ID NO: 269 - DNA, 756 bp, Zea mays
  source (0)...(0): Zea mays BAC clone full insert sequence contig bacb.pk243.l15.fis27
caaaaaatcatgaaatttgacggaggagcaatatatgctcatatagcatcctaaaaaatgtttgagccataaaatctaaagattgccaacatttctttcaattcactttcacttgttacctgagttacatgtgatatcaccttaactatccaaattttaacataatcaatacttcactttatcattttcacatagggacttcatattatctttaatagaatgtttattggtcctggtaacttatttacaatttttggtagacactagattattttatgattttaattacattttgatgattttttgtagaaagaaattaataatacacaaattgccttagaaattcataaaatttgacggagggttaacatttgtctacataaaattctaaaaaatgtttgtgccataaagtccataagatgccagtgattcttttcattttcttacacttgttgtgtgagttacacgtgaaatcagctgaagtatccaagtttcaacataacctttacttcactttctcattttcatgtagggacttgaggttatcttcttatggaatgtttattagtcttgataacttatttgcaatttttggtcgatactataatattttatggatttaaatgcattttgatgattttctgcaaaaagaaattaataatatacaaatagtctcagaaattcacaaaatttggcgtatgagtaacatatgtccatatagcatcctcaaaaatgtttgaaccataaaaaccacaa

SEQ ID NO: 270 - DNA, 923 bp, Zea mays
  source (0)...(0): Zea mays BAC clone full insert sequence contig bacb.pk243.l15.fis28
tcgttgccgcacgtcaccaattccaaaaacgggtgtctcggtgcatacaagcacgagtttttgccaccagaaccatttctttgttttgcgcaacgaacatgctgaatccactactttaggtccaaagcttatgtttgggttggtttcgcgcaatttcgttgctgcacgtcacccattccgaaaacgggtgtcgggtgcatacaaagatcgagttttcgccaccggaaccatttcttcgtttttcgcaacgaacatgcccaatccactactttaggtctaaaactcatgtttgagctggtttcgcgctatttcgatgccgcatgttacccattccgaaaaccggtgtcggggtgcatacaagcacgagtttttgccaccggaaccatttctttgttttttgcaaagaacatgcccaatccactactttaggtccaaaactcaagtttggggtggtttcgcgcaatttcgatgccgcacgtcacccatttcgaaaacgggtgttggggtgcatacaaagcacgagtttttgccaccggaaccatttctttgtttttttcaaagaacatgcccaatccactactttaggtccaaaactcatgtttggggtggttttgcgcaattttgttgccgcacgtcacccattccgaaaacgggagtcgggggtgcatacaaagcatgagttttcgccaccggaaccatttcttcgtttttcgcaacgaacatgcccaatccactactttaggtccaaaactcatatttggggtggtttcacgcaatttcgttgcagcacgtcacccattccgaaaacgggtgtcgggtgcatacaaagcatgagttttcgccaccggaaccatttcttcgtttttcgcaacaaacatgcccaatccactactttaggtccaaaactcatgtttggggtggtt

SEQ ID NO: 271 - DNA, 730 bp, Zea mays
  source (0)...(0): Zea mays BAC clone full insert sequence contig bacb.pk243.l15.fis29
gccctcattctttagtacaatgacgaagttaagatctctggcatgggcccgagtgattggcccagctaatgaaggaggtggcgctcgatgttgaggtgctgctggtgtagtcgtactcatagtgatgtcctcatcatacaaagcacgagttttcgccacaggaactatttcttcgtttttcgcaacgaacatgcccaatccactactttaggtcccaaactcatgtttggggtggtttcgtgcaatttggttgccgcacgtcaccaattccaaaaacgggtgtcagggtgcatacaagcacgagtttttgccaccggaaccttttcttcgttttgcgcaacgaacatgccgaatccactaatttaggtccaaaactcatgtttgtggtggtttcgtgcaatttcgttgccgcacgtcacccattccaaaaacgggtgtcagggtgcatacaagcacgagttttcgccaccggaaccattttttcgcttttcgcaacgaacatgcccaatccactactttaggtccaaaactcatgtttcgggtggtttcgcgcaatttcgttgccgcacgtcacccattacaaaaacgggtgtcgggcggggtgcatacaaagcacgagtttttgccaccggaaccaattcttcgtttttcgcaacgaacatgtccaatccactacattaggtccaaaactcatgtttggggtggtttcgcgctatatctttgccgcacg

SEQ ID NO: 272 - DNA, 965 bp, Zea mays
  source (0)...(0): Zea mays BAC clone full insert sequence contig bacb.pk243.l15.fis30
caatccactactttaggtccaaaactcatgtttggtgtggtttcgcactatttcgttgccgcacgtcacccattccgaaaacgggtgtcggggtgcatacaaagcacgagtttttgccaccaaaaccatttcttcgtttttcgcaacgaacatgcccaatccactactttaggtccaaaacttatgtttggggtggtttcgcgcaatttcgttgccgcacgtcacccattccgaaaactggtgtcagggtgcatacaaagcacgagttttcgccactggaaccatttcttcgtttttctcaacgaacatgcccaatccactactttaggtccaaaactcatgtttggggtggtttcgcgcaatttcgttgccgcacgttacccattccgaaaacgggtgtcgggtgcatacaaaacacgacttttcgccaccggaaccatttcttcttttttcgcagcgaaaaagtccaatccacttctttaggtcccaaaactcatgtttggggtggtttcgcgctatatcgttgccgcacgtcacccattccgaaaacgggtgtcggggtgcatacaaagcatgagtttttgccaccggaaccatttcttcgtttttcgcaacgaacatgcccattccagtactttaggtccaaaactcatgtttggggtggtttcgcgcaacttcgttgccggacgtcacgcgttccaaaaacgggtgttggggtgcatacaaagcacgagtttttgccaccggaaccatttcttcgtttttctcaacgaacatacccaatccactactttaggtacaaaactcatgtttgggttggtttcgcgcaatttcgttgccgcacgttacccattccaaaaacgattgttagggtgcatacaagcacgagtttttgccaccggaaccatttcatagtttttcacaacgaacattcccattccactactttaggtccaaaactcatg

SEQ ID NO: 273 - DNA, 1441 bp, Zea mays
  source (0)...(0): Zea mays BAC clone full insert sequence contig bacb.pk243.l15.fis31
atctttgggcaaaagtgaactgtaggtaaataaaacaaggaagattgagatctctcaccgagcaacctgaaatctgataccacttgataaacccaatgggtagaagggtgtccgatctttcgatgagagatgatggaggtggaaaacttgttggagaacgacgttggctgcccgactaccacaaccaagatggtgtggcgccttgagcgacaggtacaccgtctcctgataactacgatttggggtggaggtcgacgttgtgctatccgactacaacaaccacaagggtgctgcgccttagcgatagttacaccggctcctgttgttgctgctcttgccgtgccaagaacaaccttgaacctgcaagcaatcgagaacaagcaagaacaagataaaaagcagacgcatttcttcgttgtcgcacgttacccattccgaaaacgggtggtttcgcgcaatttcgttgtcgcacgttacccattccgaaaacgggtgtcggggtgcatacaagcacgagtttttgccaccggaaccatttcttcgttttttgcaacgaacatgcccaatccagtactttaggtccaaaagtcatgtttggggtggttttgcgcaatttcgttgccgcacgtcacccattccgaaaactggtgtcggggtgcatacaaagcttgagtttttgccaccggaaccatttcttcgtttttcgcaatgaacatgcccaatccactactttaggtccaaaactcatgtttggggtggtttcgcgtaatttcgttgccgcatgtcacccattccgaaaacgggtgtccgggtgcatacaatgcacgagttttttccaccggaaccatttcttcgtttttcgcaacgaacatgcccaatcaactattctagatccaaaactcatgtttgggttggtttcgcgcaatttcgttgccgcacgtcacccattccgaaaacgggtgtcgggtgcatacaaagcatgagttttcgccaccggaaccatttcttcgtttttcgcagcgaacaagcctaatccactactttaggtccaaaactcatgtttggggtggtttcgcgcaatttcgatgccgcacgtcacccattccgaaaacgggtgtcgggtgcatacaaatcatgagttttcgccaccggaaccatttcttcgtttttcgcaacaaacatgcccaatccactactttaggtccaaaactcatgtttggggtggtttcgcgcaatttcgttgccgcacgtcacccattccgaaaacggtagtgggggtgcatacaaagcatgagttttcgccaccggaaccatttcttcgtttttcacaacgaacatgcccaatccactactttgggtccaaaactcatatttggtgtgttttcgcacaatttcgttgtcgtacgtcacccattcccaaaacgggtgtcgaggtgcatac

SEQ ID NO: 274 - DNA, 1179 bp, Zea mays
  source (0)...(0): Zea mays BAC clone full insert sequence contig bacb.pk243.l15.fis32
gcctctgttcgtctaaccatggcaggattggaggttgatgatgcttcccgtaatatgccacactctcctcgcaccaagggtatcatacaacactttgtaaggatggtgaagacgcatacggaaggtcttgataatgacatgcaggtgacgaatgaaaagatggggcaattggaggccacacagatcgacacaaacaccaaacttgcaaatgtggaaatgacagttgctcatattgacaagagccttgtcgcactcttgaggcgatttgatgagatgcatgctaataccaatggtgggcgtgatgagggcgccgaaggtaactgggatgactatgttgccgatactgaacaagatgaccaagaagcacctaatcactggcgactacgtactaaccgtagaggtatgggtggttttcgccgacgtgaggtacatggtaatgatgatgcttttagtaaggttaaatttaaaatacctccttttgatggtaaatatgaccctgatgcttacattacttgggagattgtggttgatcaaaagtttgcatgccatgaatttcctgagaatgcgcgggttagagctgctactagtgagtttactgaatttgcttctgtttggtggatagaacatggtaagaagaatcctaataacatgccacaaacttgggatgcgttgaaacgggtcatgcgggctagatttgtcccttcttattatgcacgtgatatgctaaacaagttgcaacaattgagacagggtactaaaagtgtagaagaatattatcaggaattacaaatgggtatgctgcgttgtaacatagaggagggtgaggaatctgctatggctagatttttgggcgggttaaatagggaattcaggacatcattgcttataaagattatgctaatgtaacccgattgtttcatcttgcttgcaaagctgaaagggaagtgcagggacgacgtgctagtgcaaggtctaatgtttctgcaggaaaatctacaccatggcaacagcgcacgactacgtccatgaccggccgtacaccagcaccaactccctcatcaagtcgaccagcaccaccgccttcctccggcgacaaaccacgtgcatcttccacaaattcagcaaccaaatctgcccagaaaccagcaggtagtgccttttcagtagcctccatgggta

SEQ ID NO: 275 - DNA, 1029 bp, Zea mays
  source (0)...(0): Zea mays BAC clone full insert sequence contig bacb.pk243.l15.fis33
cgccatgttccatcttttttaggcactaaaataaccggaacagcacacagactaagagactcacgcacataacctttgtcgagtagttcttgaacttgtcgctgaatttcttttgtttcctccggatttgtcctatatggagcacgatttggcaaagatgcaccaggaataagatcaatttggtgctcaatccctcgtataggtggcagcccctctggtatctcacttggaaatacatcagaatactcctgcaaaatgttagtaacaacaggaggcaaagaatgctgcatatcttgaattgaaatcaaagcatccttgcataccaaggcgtaggcaacagaagtggaagcaaataattcattaacatcagtttttgtcgcaagcaagcaatgtcctttcaattttatcccatctttgttattaccaacagctttaatattcttgttgttctcagttttagctttggtagctttagcaacatcatcacgcacaatagcctcaggggacatgggaatcaaaataattttcttatcatggtgtatgagagttattgatttaatctaccatgatgcatacaatctgaatcaaattgccatggtctacctagcagaatattacaagcatccataggcacaacatcacagtcaacaacatcacgatatgaaccaatagcaaaattaattcgtaccagcttggttaccttgaccttaccactattgttaagccattgaatgtgatatggatgcgggtgcggtttggtcgtaagtgcaagcttctccaccatgtcgctgctagccaagttgttgcagctacctccatcaatgatcaaacgacatgaacgctctttaatgacacactttgtttgaaacaacgtatgtcgctgattctgctctgccttctccatttgtgcactaagcacacgctgtacaatgaggctctcataatgctctgcatcatctgcaccaaccgttcctcggggtggttctttagtgcctgcatcatcagccgcaagcaaacgaggtgaagctc

SEQ ID NO: 276 - DNA, 1058 bp, Zea mays
  source (0)...(0): Zea mays BAC clone full insert sequence contig bacb.pk243.l15.fis34
ttccttgatgagatttagtttggttgcatttgagaaaggaaaggtttcctgaattgcaaaaatctaaattgttgcctcgagccgatggaccgtttaaagtgctagagaaaattaacgacaatgcatataggctagatctgcttgcagactttggggttagccccacatttaacattgcagatttaaagccctacttgggagaggaagttgagcttgagtcgaggacgactcaaatgcaagaaggggagaatgttgaagacatccacactactgatacatctatgccaatacaagtaccaatttctggtcccattacttctggtcccattactcgcgctcgtgctcgtcaactcaaccatcaggtgcttacactcttgaatgcatgtccatcatatttagaccatggagacccgtgcactcttgttttgcttaggaaccagggagaagaccgaaagggaaaaggatttgaacatgctggattcggactgcagaagaacaccaaattgtgacggtcaccacggtcacatgcgggctcggattggaatgttcaagcacaacatggaaagcctatcaagtctactttcatatggatccggaattatagtcatatctgtactgaggccgccgtaatcattgtttccttacagagacatttcctgccttttctgcccatggtgctgtgtgaccctattttggcccaatgggtcgtgtatcaagttgggtccattagggacgcatcctagggttgcagcacgaccccaatacccttgtggtcgtcctcccatgtttataaaccccctagccgccaccaagaacagcgggtttttttagatcaagtttagctctcgctacttgcttgtaagcgcgcgtgctggttcagccgcccgtcttcttgtcttcggaaccccaccatattggagtttgattttgaaacctgcatttagatctggtaattcagtacttgttctacttgttcttgctagttcttcgattgcttgcaggacgagtgccctagtggccagggtgtcacgctccacaagatcgtgacagccatagga

SEQ ID NO: 277 - DNA, 1335 bp, Zea mays
  source (0)...(0): Zea mays BAC clone full insert sequence contig bacb.pk243.l15.fis35
  misc_feature (1)...(1335): n = A,T,C or G
tgactcggttttgtggcgtgatcaaacaggagatggtggcggcgctagggtttgaatggtggaagaacacaatgcaaccaacaacaaatgacgcgaaagcacacaaattcaacaatgcagattattgaaagaacgtgcgaggctcaaaatggtgctgggataaggtctaacctgaatttttatgtggttttgtggactgtaggaaaaaaacactctataaactcaccgatcaacctggaaatctgataccaattgatgtagctgaggtgcccgatctttcggtgagaggagataattccgatttggcggaagatgacccttgcgatccgactacgacgagcaagcccgaggcgccaatgcaatcgctgaaccaatgatgaggacatcctccactattacccgttggcaaagacgtaattggcccagatggcccaattgtagtcggacggcgaccgtgtgagcctcagaattatcccacctcgcttaacttgggaggaggaagccactttaaaagggagagtcacccttccccattggactagtcttttggggcgattgggcctttccctgagttgggtgtgcctaatgaactgttgggctccgggcaaccctaatttgttgggcctcggccaaccccacctggactgggtgtatcatctggtatcagagctagggcccattttaagaaggtaggaatgatgaggacatcctccactattacccgttggcaaagacgtaattggcccagatggcccaattgtagtcggacggcgaccgtgtgagcctcagaattatcccacctcgcttaacttgggaggaggaagccactttaaaagggagagtcacccttccccattggactagtcttttggggcgattgggcctttccctgagttgggtgtgcctaatgaactgttgggctccgggcaaccctaatttgttgggcctcggccaaccccacctggactgggtgtatcaaccaactccctgtggttaccgaccttgctgatgcgagatcggcctgatcacgaagatcgtttcctgtgcgcaatcgaagaacgaacaagaaaaagatgcgagcaatctaatctattactcgagggtggagttctgaatacaagaagacaacgcagatttgcgcgtgttcgagagtagctaaggctaacgtaaaacaaaactcgaagacaaaggaggcgcagctcctgtttaaatagagagggggcgcagcccctaggggcggccaaccctangtcgtccactatgggccgcagttgggttggtcgtctattcttctgggccctcattctttagtacaatgacgaagttaagatctct

SEQ ID NO: 278 - DNA, 923 bp, Zea mays
  source (0)...(0): Zea mays BAC clone full insert sequence contig bacb.pk243.l15.fis36
aatcaatgacagaaaccaaacgaggcgtctagaaactgccaagagagtttcgttctccattagaactcctttctattcctctatttaagcaagtagcagccaccaaagaacttaggtttttgtttgatgtaagtttagcctttgctacttccttgtaaacgcgtgtgtcggctagaccacccggatacttgaaacagaaccccaactctatcagatccgtgagcgtctgtgttttatcttgttcttgcttgttctcgattgcttgcaggttaaaggctattcttggcacggcaagagcagcaacaacaggagccggtgtaactatcgctaaggcgcagcacccttgtggttgttgtagtcggatagcacaacgtcgacctccaccccaaatcatagttatcaggagacggtgtacctatcggtcaaggcgccacaccatcttggttgtggtagtcgggcagccaacgtcgttctccaacaagttttccacctccatcatctctcatcgaaagatcgggcacccttctaccccgttgggtttatcattcagtgtcgcctgggttgacatgtacctacacctgagctgcatggttagtggcaagtactgtgatgagaacataaacccgcaagatatgggccatgtttatgggctcccgctaccaaagactttgaagggaccaaataaggttgatttggggacccaaataatgatatttccaaaaaatttctaacccagcaaggccattcctccaaattttaaaaaactaacttggggttgagggagaacaccctaaaaattccaaggaaaaactcctttttacacaaaaggggggaggaaattttaagaaaaccttccccgccttcaataaaaaaacaacacccggggaggccccctctttaaaattttaaaaaagggggagaag

SEQ ID NO: 279 - DNA, 1558 bp, Zea mays
  source (0)...(0): Zea mays BAC clone full insert sequence contig bacb.pk243.l15.fis37
  misc_feature (1)...(1558): n = A,T,C or G
atctggaaagggcacatctttgtagaagaatgcgtggcatgattgtaagcaaattcaatatgaggcaagcaatcctcccaacgtctcaaattcttgtctaaaacagccctaagcatggtagataaagtgctatttactacctcagtttgtccatcagtctgagggtgacaagtagtgctaaacaacaatttagttcccaatttattccaaagagatctccaaaaatggcttagaaacttagcatcgcgatcagagactattgtttttggaataccatgtaaacgaataatttctctaaagaacaattcagcaacaatgctagcatcatcagttttatgacaaggtataaagtgagccattttagagaatctatcaacaaccacaaaaatactatccctccccttcttagttctaggcaagcccaaaataaagtccatagagatatcaagccaaggagaagaagggacaggcaaaggcatatacaaaccatggttgttcaaccgtgacttagctttctgacaagtagtgcagcgtgcaacaaggcgctccacatcagcgcgcatccgaggccaaaagaaatgggcagccaacacctcatgcgttttgtagacgccaaaatgccccatgagaccgcctccatgcgcttcctgtaacaacaaaagacgaaccgagctagctggaacacaaagcttgttagcgcgaaacaggaacccatcctgtatgtgaaatttgccccatggtatcccattaatacaatggccgaaagcatctttaaaatcagcatcgtcaacatattgatccttcatagtgtccaaaccaaagattttaaaatctaattgtgacagcatggtatagcgacgagacaaagcatcagcaataacattgtccttcccgttcttgtgtttaataatgtaaggaaaggactcaatgaattcgacccatttagcatgacgacggttcagatttgtttgggtacgaatatgttttaaagcctcatgatcagaatgaattatgaactcacgatgccaaagatagtgctgccaagtatgcaaagtgcgcactaaagcgtaaagctccttatcataagtagaatatttcagactagcaccgcttaatttttcactaaaataagcaactggttttccttcttgtaacaaaacagcacctagcccaataccgctagcatcgcattcaagctcaaaaactttattaaaatcaggcaattgcaagaggggagcttgggttaacttatctttcaaagtgctgaacgctacctcctgcgaatcactccaagcaaacggcacatctttctttgtaagctcatgtagaggcgctgcaatggagctaaaatcacgaacaaatctgcggtagaaaccggcaagtccaagaaagctccgaatttgtgtgaccgtcgtcggtgtaggccactcccgaatggcagcaatcttgctgctatccacctcaatgccctgcggagtaaccacataaccaagaaacgagacacgttgcgtgcaaaatgtgcacttttccatgnttaccaagcaagcgagcagcacgc

SEQ ID NO: 280 - DNA, 1081 bp, Zea mays
  source (0)...(0): Zea mays BAC clone full insert sequence contig bacb.pk243.l15.fis38
taagcaaaacaagagtgcacgggtccccatggtctaaataagatggacatgatgatgaggacatcactatgagtacgactacaccagcagcacctccacatcaagcgccacttccttcattagctgggccaatcactcgggcccgtgccagagatcttaacttcgtcatgctactgaaaaatgagggcccagaagaatagacgaccagcccaactgcggcccatagtggacgacctagggttggccgcccctaggggctgcgccccctctatttatccaggagctgcgcctcctttattttcgagttttgttttacgttagccttagctactctcgaacacgcgcaaatctgcactgtcttcgtgtattcagaactccaccctcgagtaatagattagattgctcgcatctttttcttgttcgttcttcgattgcgcacaagaaacgatcttcgtgatcaggccgatctcgcatcagcaaggtcggtaaccacagggagttggttcagcgattgcattggcgcctcgggcttgctcgtcgtagtcggatcgcaagggtcatcttccgccaaatcggaattatctctactcgccgaaagatcgggcacctcagctacatcaattggtatcagatttccaggttgatcggtgagtttatcgagcgtttttttcctacagtccacaaaaccgcataaaaattcaggttagatcttatcccagcacccttttgagcctcgcactttctttcaataatctgcattgttgaatttgtgtgctttcacgtcatttcttgctggttgcattgtgttcttccaccattcaaaccctagcgccgccaccatctcccgtttgatcacgccacaaaccgagtcaacgttgtttccttgtttttctccttcggttacgtcaaaaaaaaacagaaaaaacaaaccgagtcaacggccgtttccttgattttctccttcggttacgaaaaaaacagaaaaaaaacaaaccgagtcaacgaccgcttccttgttttttctccttcggttacctaaaaaaaaccgattccaaaaaaaagaaacgaaggagaaagatac

SEQ ID NO: 281 - DNA, 1607 bp, Zea mays
  source (0)...(0): Zea mays BAC clone full insert sequence contig bacb.pk243.l15.fis39
aaatattcgttaccgacgctatccgtgtctgattagctccgcattcgatccacgactatccgtttttgtattcgagaacatccgtatttgtattcgtatttgaagctatccgcattcgattccgactaaaaatatgaaaacaaatatggtttcattgatatccgtccgtatccgatccgattacacccctaagcatgagttttcgccacagaaaccatttctttgtttttcgcaacaaacatgcccaatccactactttaggtccaaaactcatgtttggggtggtttcgcgcaatttcgttgccgcacgtcacccattccgaaaacggtagtcggggtgcatacaaagcatgagtttttgccaccggaaccatttcttcgtttttcacaacgaacatgcccaatccactactttgggtccaaaactcatgtttagtgtgttttcgcgcaatttcgttgtcgtacgtcacccattcccaaaacgggtgtcggggtgcatataaagcacgacttttgccaccggaaccaattcttcgtttttcgcaacgaacatgcccaatccacttctttaggtccaaaactcatgtttggggtggttccgcgctatttcgttgccgcacgtcacccattccgaaaacgggggtcggagtgcatacaaagcacgagtttttgccaccggaaccatttcttcgtttttgcaacgaacatgcccaatccactactttaggtctaaaactcatgtttgggttggtttcgcgcaatttcgttgccgcacggaacccattccgaaaacgggtgtcagggtggatacaaagcacgagttttcgccaccggaaccatttcttcgtttttcgcaacaaacatgcccaatccactactttaggtccaaaactcatgtttggggtggtttcgcgcaatttcgttgccgcacgtcacccattccgaaaacgggtgtcggatgcatacaaagcatgagttttcgccaccggaaccatttcttcgtttttcgcaacgaacatgcccaatccactactttaggtccaaaactcatgtttggtgtggtttcgcgctatttcgttgccgcacgtcacccattccgaaaacgggtgtcggggtgcatacaaagcacgagtttttgccaccgaaaccatttcttcgtttttcgcaacgaacatgcccaatccactactttaggtccaaaacttatgtttggggtggtttcgcgcaatttcgttgccgcacgtcacccattccgaaagctggtgtcggggtgtatacaaagcacgagttttcgccattggaaccatttcttcgtttttctcaacgaacatgcccaatccactactttaggtccaaaactcatgttgggggtggtttcgcgcaatttcgttgccgcacgttacccattcggaaaacgggtgtcgggtgcatacaaagcatgacttttcgccaccggaaccatttcttcgtttttcgcagcgaacaagtccaatccactactttaggtccaaaactcatgtttggggtggtttcgcgcaatttcgttgccgcacgtcacccactctgaaaacgggtgtcggggtgctgagcacgagttttcggcaccg

SEQ ID NO: 282 - DNA, 968 bp, Zea mays
  source (0)...(0): Zea mays BAC clone full insert sequence contig bacb.pk243.l15.fis40
cacaactacaagccgggttagcgttagaagtaaaaacaagtccgcgagagagggtgcaaaacaaatctcaagcaaataagaagtgagacacacggatttgttttaccgaggttcggttctcgcaaacctactccccgttgaggaggccacaaaggccgggtctttttcaaccctttccctctctcaaacggtcactcaaaccgagtgagcttctcttctcaaatcacttgggaatcaaacttcccgcaaggaccaccacacaattggtgtctcttgcctcaattacaagtgagtgtttgatcacaagaaagaatgcgaaagaaaagaagcgatccaagcgcaagagctcaaatgaacactacaaatcactctctctagtcactaaggatttgtgtgaagttgggagaggatttgatctcttttggtgtgctttgcaatgaatgctagctcttgtatagtggttggaagctggaaaacttggatgctttgaatgtgggggtggttggggtatttatagccccaaccaccaaacttgaccgttggtggaggttgtctgttgtatggtgcaccggacagtccggtgcacatcggacatgtccggtgcgccacccacgtcaccaataccgttggattccgaccgttggagcttctgtcttctgggcccgcctggatgtccggtgcacaccggacatgtactgttcaatgtccggtgcgccagtatgggcgtgcctgacttctgcgcgcttctggcgcgcattgaatgcgcctgcaggtgaccgttggcgcgaagtagtcgttgctctgctggttcacggaacagtccggtgtacaccggacatgtccgggtgattatagcggagcagccgctgcgttttcccgaggatgggagttccggaagctgctcttccttggagcaccgaaactgtccggtgtacaccggaaagtctggtgaattgtagcggagtgcc

SEQ ID NO: 283 - DNA, 888 bp, Zea mays
  source (0)...(0): Zea mays BAC clone full insert sequence contig bacb.pk243.l15.fis41
gactaagcttttattttctactacatgtcatcctcaaactgatggtcaaactgaagttgtgaatagaactttgtctactatgttaagggcagttctaaagaagaatattaagatgtgggaggactgtttgcctcatattgaatttgcttataatcgatcattgcattctactacaaagatgtgcccatttcagattgtatatggtttgttacctcgtgctcctattgatttaatgcctttgccatcttctgaaaaactaaattttgatgctactaggcgtgctgaattgatgttaaaactgcacgaaactactaaagaaaacatagagcgtatgaatgctagatataagtttgctagtgataaaggtagaaaggaaataaattttgaacctggagatttagtttggttgcatttgagaaaggaaaggtttcctgaattacgaaaatctaaattgttgcctcgagccgatggaccgtttaaagtgctagagaaaattaacgacaatgcatataggctagatctgcctgcagactttggggttagccccacatttaacattgcagatttaaagccctacttgggagaggaagttgagcttgagtcgaggacgactcaaatgcaagaaggggagaatgatgaagacatccacactactgatgcatctataccaatacaagtaccaatttctggtcccattactcgcgctcgtgctcgtcaactcaaccatcaggtgattacactcttgagttcatgtccatcatatttagaccatggagacccgtgcactcttgttttgcttaggaatcagggagaaaaccgaaagggaaaggatttgaacatgctggattcggactgcagaagaacaccaaacttgtgacggtcaccacg

SEQ ID NO: 284 - DNA, 858 bp, Zea mays
  source (0)...(0): Zea mays BAC clone full insert sequence contig bacb.pk243.l15.fis42
gataccaaatgaggcgtccagaaactgtcgagagaacttcttgactccaccagtccgagggaattcgtaactgcagcaagcaccatattaaatggagcatatctttcatctcctaaggttgtttagtgcaaataagtacttgttggaaagctctcttcgtctactttctggcggctgaagaatcaatgggagaaaccaaacggcacgtccagaaactgtcgagagagcttcgttctccaccagaacttctttctattcctctatttaagcaactagcagccaccaaagaacttgggttttttgtttgatgtaagtttagcctttgttacttccttgtaaaagcgtgtgtcggctagaccacccggatacttgaaacagaaccccaactctatcagatccgtgagcgtctgctttttatcttgttcttgcttgttctcgattgcttgcaggttcaaggttgttcttggcacggcaagagcagcaacaacaggagccggtgtaactatcgctaaggcgcagcacccttgtggttgttgtagtcggatagcacaacgtcgacctccaccccaaatcgtagttatcaggagacggtgtacctgtcgctcaaggcgccacaccatcttggttgtggtagtcgggcagccaacgtcgttctccaacaagttttccacctccatcatctctcatcgaaagatcggacacccttctacccattgggtttatcaagtggtatcagatttcaggttgctcggtgagagatctcaatcttccttgttttatttacctacagtccacttttgcccaaagatatatttagagcagaaattcacctaaaaacagtttgagcctttgctttac

SEQ ID NO: 285 - DNA, 1380 bp, Zea mays
  source (0)...(0): Zea mays BAC clone full insert sequence contig bacb.pk243.l15.fis43
catcctggcacgccttgatgcgttgaccacaaagatggagcaggactacggcggtgacactgagcaagacgatggagatcgccatggtcgtgcatgccatgtggttcgtcatccccctaatgacttattttctaagattaaatttaaaattccaccttttcatggcaaatatgatcctgctgcatatcttgattgggagttagaggttgaacaaaaattttcatgccatgatattgctgcacattctcagattaaagctgctattagtgaatttactgattttgctttaatttggtggcgtgagtataaaataaaacatcccactgccattccaaccacttgggatcagttgaaagctgcgatgcgacatcgatttgtgccttcatattatgctcgtgatttgcttaataaaatgaagcgttttcagcaaggttctcaatctgttgaggagtatttccaggagttacaaaaaggtatgattcgttgtgggatattggaggacaacgacgctgctacggcacattttcgtggtggtttaaaccgcgaaatccaggatatacttgattataaggaatattatgatatgactactttatttgaatatgcttgcaaagctgaacgtgaagtgcagggacgccgctcgaagccatattctaacccttttgcaggacgaagctcgacatccacctcagcaccagttccccctgcgccatccacgtccaccactactccacgcgagaagacgaccaaaccagccagcactgccccacccacaggtcgtacacgggatattcagtgtcatcgctgtagaggatttggccatgtgattcaggactgcccaaacaagcgcactttgctcattcgtgacgatggtgagtactcttccgctagtgattctgaagaaattgaacatgcactatgataaacccaatgggtagaagggtgcccgatctttcgatgagagatgatggaggtggaaaacttgttggagaacgacgttggctgcccggctaccacaaccaagatggtgtggcgccttgagcgacaggtacaccgtctcctgataactacgatttggggtggaggtcgacgttgtgctatccgactacaacaaccacaagggtgctgcgccttagcgatagttacaccggctcctgttgttgctgctgttgccgtgccaagaacaaccttgaacctgcaagcaatcgagaacaagcaagaacaagataaaaagcagacgctcacggatctgatagagttggggttctgtttcaagtatccgggtggtctagccgacacacgcgtttacaaggaagtagcaaaggctaaacttacatcaaacaaaaaacccaagtgctttggtggctgctagttgcttaa

SEQ ID NO: 286 - DNA, 1277 bp, Zea mays
  source (0)...(0): Zea mays BAC clone full insert sequence contig bacb.pk243.l15.fis44
  misc_feature (1)...(1277): n = A,T,C or G
ttgtaaagatgggaaaggatggaacaaatatatcgttagtgatgggtttgtgtttagagctaacaagctatgcattccagctagctccgttcgtttgttgttgttacaggaagcacatggaggtggcttaatgggacattttggagcaaagaaaacggaggacatacttgctggtcatttcttttggcccaagatgagaagagatgtggtgagattggttgctcgttgcacgacatgtcaaaaggcgaagtcacggttaaatccacacggtttgtatttgcctctacccgttcctagtgctccttgggaagatatttctatggattttgtgctgggattgcctaggactaggaaaggacgtgatagtgtgtttgtggttgttgatagattttctaagatggcacatttcataccatgtcataaaactgacgatgctactcatattgctgatttgttctttcgtgaaattgttcgcttgcatggtgtgcccaacacaatcgtttctgatcgtgatgctaaatttcttagtcatttttggaggactttgtgggcaaaattggggactaagcttttattttctactacatgtcatcctcaaactgatggtcaaactgaagttgtgaatagaactttgtctactatgttaagggcggttctaaagaagaatattaagatgtgggaggaatgtttgcctcatgttgaatttgcttataatcgatcattgcattctactacaaagatgtgcccatttcagattgtatatggtttgttgcctcgtgctcctattgatttaatgcctttgccatcttctgaaaaactaaattttgatgctactaggcgtgctgaattgatgttaaaactgcatgaaactactaaagaaaacatagagcgtatgaatgctagatataagtttgctagtgataaaggtagaaaggaaataaattttgaacctggagatttagtttggttgcatttgagaaaggaaaggtttcctgaattgcgaaaatctaaattgttgcctcgagccgatggaccgtttaaagtgctagagaaaattaacgacaatgcatatatgctagatctgcttgcagactttggggttagccccacatttaacattgcagatttaaagccctacttgggagaggaagttgagcttgagtcgaggacgactcanatgcaagaaggggagaatgatgaagacatccacactactgatacatctatgccaatacaagtaccaatttctgggtccattacttctggtcccatactcg

SEQ ID NO: 287 - DNA, 1261 bp, Zea mays
  source (0)...(0): Zea mays BAC clone full insert sequence contig bacb.pk243.l15.fis45
  misc_feature (1)...(1261): n = A,T,C or G
ttttttttttttttttagggcgggggaagaatcttaaattttctccccaaagaggtgaggagggcttttttttgggggatgggtttcaacaccaaggggccttatggggttttaacaaattccccgtggcaggttgaagtttcctgggacgtttgttttgatgagccaaacgctttccaagtagagcaagttgatcttgatgagatagttatggaagagcccccggcatcgcataaagaaaatttccatggggatgtggtctaagaatcggagaggcctccaaatgcacaggatcaaccatcctctccatggcaagcatctccaccgactcaaaatgaggatgaagctcaagttgatgaagaagaaggtcaagcaagtgaaccacctcaagataacggcaatgatcaagggggagatgcaaatgatcaagacaaggaggatgaagagcaaagaccgccacacccaagagtccaccaagcaattcaacgagatcaccccgtcgacaccatcctcgacgacattcataagggggtaactactagatctcgtgttgcacatttttgtgagcattactctttcgtttcctctattgagccacacaggatagacgaagcactccaagaatcggattaggtggtggcgatgcaagaggagctcaacaacttcactaggaatgaggtatggcatttagttccacgtcctaatcaaaatgttgtaggaaccaaatgggtcttccgcaacaagcaagatgagcatggtgtggtgacaaggaacaagctcgacttgtggccaagggatactcccaagtcgaaggtttggattttggtgaaacctatgcacccgtagctaggcttgagtcaattcgcatattattggcctatgttacttaccatggctttaagctttatcaaatggacgtgaaaagtgccttcctcaatggaccaatcaaggaagaggtctatgttgagcaacctcccggctttgaagatagtgagtaccctaaccatgtttataagctctctaaggcgctttatgggctcaagcaagccccaagagcatggtatgaatgcctaagagatttccttatcgctaatggcttcaaagtcgaaaaggccgatcctactttatttactaaaactcttgaaaatgacttgtttgtatgccaaatttatgttgatgatattatatttgggtctactaacgagtctacatgtgaaagatttagtangatcatgacacanaaattcgagatgtctatgat

SEQ ID NO: 288 - DNA, 1105 bp, Zea mays
  source (0)...(0): Zea mays BAC clone full insert sequence contig bacb.pk243.l15.fis46
ctgcgaacgccccacatgtagatgctgctgcacatgttgaacaaatgattaccatacatgaacaaacgaaacagaacattgctgctactaatgctaaaaatcaggttgctggtagtaaaggaagaaaacatgttacttttgagccaggtgatatggtttggttgcacttgagaaaggatcggtttcctactttgcgccgttctaaattaatgcctcgtgctgctggtccttttaaggtgctaacaaagattaatgataatgcttatatccttgacctgcctgcggaatttggtgtttccactagttttaatgttgcaaatttgaaaccatatatggccgaggatgaggagttgtcgtcgaggacgacttcacttcaagaaggggaggatgatgaggacatcactatgagtacgactacaccagcagcacctccacatcaagcgccacttccttcattagctggccaatcactcgggcccgtgccagagatcttaacttcgtcatgctactgaaaaatgagggcccagaagaatagacgaccagcccaactgcggcccatagtggacgacctagggttggccgcccctaggggttgcgccccctctatttatccaggagctgcgcctcctttattttcgagttttgttttacgttagccttagctactctcgaacacgcgcaaatctgagctgtcttcgtgtattcagaactccaccctcgagtaatagattagattgctcgcatctttttcttgttcgttcttcgattgcgcacaggaaacgatcttcgtgatcaggccgatctcgcatcagcaaggtcggtaaccacagggagttggttcagcgattgcattggcgcctcgggcttgctcgtcgtagtcggatcgcaagggtcatcttccgccaaatcggaattatctcctctcatcgaaagatcgggcacctcagctacatcattgtatccaccccgacacccgttttcggaatgggtgacgtgcggcaatgaaatagcgcgaaaccacaccaaacatgagttttagacctaaagtagtggattgggcatgtttgttgcgaaaaacgaagaattggttccggtggcaaaagtc

SEQ ID NO: 289 - DNA, 1028 bp, Zea mays
  source (0)...(0): Zea mays BAC clone full insert sequence contig bacb.pk243.l15.fis47
  misc_feature (1)...(1028): n = A,T,C or G
gagaaagcaaaaggcgagtgcataaaaaaagccgcactaatcagcaaaacaaaaaaaagacacgtgcaaaaaaaaagagagaaaaaaccagttctgatttttggtagataaaatttgtaagtgcaacaaaacaaaaggcagtttgtgtgccttctttttatagtttcagaaatccgattgatgttctgaccttttggtgatactatttgtgtaacggctcgtgtctctattacggtttggactagaaccagcacaacaccattatagaacgtttattcaacttgttgtgactaacgtggtactagctattccttggaactattgaaattgcagctacctataaatccacaaatttttctacaacaccaccaggttgtgctagctgccaccgttgttgttgttcttgctgtttgctggcacctcctgtattgcgtggtgagaatttgtaagaactttcttaaccagtttgagaatgagagattacaacaatgattcctagtagtttataggatcaaagatatttttattgttttcttgtctttactgaacatggcaggtgatatggagatttctgagccaactgaacattatattcaaggcatcattcgacacttgccttcatatgccggtaaattcgatcctcatgcatacattgattgggagctaaaggtagataaggaatttgataagcatgatctatctcaaaaacaaaagatttatattgcctctaatttgttaactgagcacgcattgatggaatggaaatacatttgtaggcacaacaaatttccacaatcttgggaagacttcaaacttcattttagagatgcattcattcctgcatactattctgatcatttgctttctaaattagacaccttaaagcagggtgctaggactatgaaagattattattatgattttaaaatttgtaccatgtttgctcgtttagatgaatgcatggaagatgtaatgactaggttcatganagggactcattctgaaattcagactatagtcatgcatga

SEQ ID NO: 290 - DNA, 1136 bp, Zea mays
  source (0)...(0): Zea mays BAC clone full insert sequence contig bacb.pk243.l15.fis48
catctgatatctgttttaggtgaaacttcgtgtagctcctatcttgttgcttcttgtgctgagaaaaatatcaaaaaatcatacaaaaaaagaaaaacaaaatcacctgtgatttctactagtgcctttttggcatcactagtacaatatttatggtactgccattctgctagttccatccatcctttgcacctgtggccagcaatatagtttcgtgttttgcactataattcaactttgcattattgtttgatcgtgctaatccttgacttgagtgcagcctacccacaactcctcatatttctacgacgagcaggtttctgtttctccacgcaatcgctcatccaatctttcaccggttccacctgttgattgcagttcaccactgtggcttggtaagaacggataagaacttgataacagcactagtgtgagcgccttgtgagcagtacacccctgtttttgtcgttgggttttctccttttggtgttttggtgtttgcgctaaccatggcaggagcacacgacatggtggatgcccagttgcaggaagtaaggggacaagttgatggacttgctgctgacattaggacgatgcatgaacggcttgattcaacgatcacttcgacgaccgagcgtttcaaccaacttgaccttgctcaaacggcgactcgcaccacactcgacaccatcctggcacgccttgatgcattgaccacaaagatggagcaggaatacggcggtgacactgagcaggacgatggagatcgccgtggttgtgcacgtcgtgtggttcgtcatccccctaatgacttaatttctaagattaaatttaaaattccatcttttaatggtaaatatgatcctgctgcatatcttgattgggaattagaggtagaacagaaattttcatgccatgatattcctgctaatagccaagtgaaggctgccattagtgaatttactgattttgctttaatttggtggcgtgagtataaacaaaaacttcccattaacagtgtcattacttggacccaattaaaaactgccatgcgccacagatttgttccttcctattatgctcgtgatttgcttaacaaaatgcagcgttttcaacaaggttcacagtctgttgag

SEQ ID NO: 291 - DNA, 689 bp, Zea mays
  source (0)...(0): Zea mays BAC clone full insert sequence contig bacb.pk243.l15.fis49
cgttgcgtgcaaaatgtgcacttttccatgttaccaagcaagcgagcagcacgcaaagcgtcaaaaacagcacgcaaatgttctaaatgctcctctatagacttgctgtaaataaggatatcatcgaaataaacaacaacaaacaaacctatgaaggcccgtagaacttcgttcattaaacgcataaaggtgctggagcattagtcaatccaaatggcataaccaaccattcatataaaccaaatttcgttttaaaagccgttttccattcatcaccgagtttcattctaatctgatggtaaccgctacgcaaatcaaccttagagaaaataacggcaccactaagctcatctagcatatcatcaaggcgtggaataggatatcgataacgaactgtgatgttattaatagcacgacaatctacgcacatacgccatgacccatctttctttggaacgagtaaaacaggaaccgagcaagggctaagagactcacgaatgtaacccttatcaagcagcgtctgcacctggcgctggatctccttcgtctcatctggatttgtacggtacggggcacggttcggaagagaagcgccggggatgagatcgatctgatgctcaatgccacagaggggaggaagacccggtggtaagtccgtaggataaacatcagcatactcctgcaaaagg

SEQ ID NO: 292 - DNA, 832 bp, Zea mays
  source (0)...(0): Zea mays BAC clone full insert sequence contig bacb.pk243.l15.fis50
gtgatttgcttaacaaaatgcagcgttttcaacaaggttcacagtctgttgaggattattaccaggagttacaaaagggtatgcttcgttgtggtttagttgagtcggatgacgctgctatggcgcgttttcgtggtggtttgaacagggaaattcaggatatacttgattataaggattattttgatataaccacattgtttgaatatgcttgcaaagctgaacgtgaagtgcagggacgacgatcaaagacatatactaactctcttgcaggccggggtccaacacacagctcaactccttccagccctgcaccttctacgcctagcactacatcgcgcacagggacgaccaagccagtggcgccccctgccaaaggcgccgcttcttccacaggacgtacacgggatattcagtgccatcgttgcagagggtttgggcatatgattcgggactgcccaaacaagcgtaccttgcttatacgtgacaatggtgagtactcttcagccagtgattctgaggaaactagtcatgctatgattgccactaaccatgcagaaaatgaggaagtccacgttgatcctatcgacgccgataggtatgagagtcttgttgtgcagcgtgttctcagcacacaggttgcccaggccgaaaaaaatcagcgacacactctattccataccaagggcgtcgtgcacgaacggtcgattcgcatcatcatcgatagtggcagctgcaacaatttggcaagtacagcgttggtagagaaattatccttgcccactcgcacacatccacatccgtatcacattcaatggcttaatgatggtgg

SEQ ID NO: 293 - DNA, 2163 bp, Zea mays
  source (0)...(0): Zea mays BAC clone full insert sequence contig bacb.pk243.l15.fis51
ggtacctcccttaaaccgggcataacttttcgctcgggtgtccaaaaaatctgaaatttttacaggagctagttgacaccattctgaggccgaccaaacttaccttcggtctgtttgggtttcgacaaaattgtcaaaaaaattcaggaaaataaagaaaaaaatccgtcaaagttcttgcacgctctttagagaacttcctgattttctgtagaccacatcagaactctgttttaggtgaaacttcgtgtagctcctattttgttgcttcttgtgctgagaaaaatatcaaaaaaatcatacaaaaaagaaaaacaaaatcacttgtgattcctactagtggcctcgctagtacaatatttacggtactgccattctgctagttccatccgtcctttgcacttgtggccagcaatatagtttcgtgttctgcactataattcaactttgcattattgtttggtcgtgctaatccttgacttgagtgcagcctacccaaaactccacatatttctacgacgagaaggtttctgtttctccaggcaatcgctcatccaatctttcaccggttccacctgttggttgcaggtcaccactgtggcttggtaagaacggataagaatttgataacagcactagtgtgagcgccttgtgagcagtacacccctgtttttgtcgttgtttttttttcttcttttggtgttttggtgtttgcgctaactatggcaggagcacacgacacggtggatgcccagttgctggaagtaaggggacaagttgatggacttgctgatgacattaggacgatgcatgaacggcttgattcaacggtcacttcgacgaccgagcgtttcaaccagcttgaccttgctcaaacggcgactcgcaccacactcgacaccatcctggcacgccttgatgcgttgaccacaaagatggagcaggactacggcggtgacactgagtgggaagatggagatcgccgtggtcgtgcacgccatgtggttcgtcatccccctaatgacttattttctaagattaaatttaaaattccaccttttaatggcaaatatgatcctgctgcatatcttgattgggagttagaggttgaacaaaaattttcatgccatgatattgctgcacattctcaggttaaagctgctattagtgaatttactgattttgctttaatttggtggcgtgagtttaaaataaaacatcccactaccattccaaccacttgggatcagttgaaagctgcgatgcgacatcgatttgtgccttcgtattatgctcgtgatttgcttaataaaatgcagcgttttcagcaaggttctcaatctgttgaggactatttccaggagttacaaaaaggtatgattcgttgtgggatattagaggacaacgacgctgctatggcacgttttcgtggtggtttaaaccgcgaaatccaagatatacttgattataaggaatattatgatatgactactttatttgaatatgcttgcaaagctgaacgtgaagtacagggacgccgctcgaagccatattctaacccttttgcaggacgaagctcgacatccacctcagcaccagttccccctgcgccatccacgtccaccactactccacgcgagaagacgaccaaaccagccagcactgccccacccacaggtcgtacacgggatattcagtgccatcgttgcagagggtttgggcacatgattcgggactgcccaaacaagcgtaccttgcttatacgtgacaatggtgagtactcttcagccagtgattctgaggaaactagtcatgctatgattgccactaaccatgcagaaaatgaggaagtccacattgatcccatcgacgccgataggtatgagagtcttgttgtgcagcgtgttctcagcacacaggttgcccaggccgaaaaaaatcagcgacacactctattccataccaagggcgttgtgcacgaacggtcgattcgcatcatcatcgatagtggcagctgcaacaatttggcaagtacagcgttggtagagaaattatccttgcccactcgctcacacccacatccgtatcacatccaatggctcaatgatggtggtaaaataaaggtaacacggttcggtacgtgtcccctttttcgctggggtg

SEQ ID NO: 294 - DNA, 2126 bp, Zea mays
  source (0)...(0): Zea mays BAC clone full insert sequence contig bacb.pk243.l15.fis52
  misc_feature (1)...(2126): n = A,T,C or G
ttatgattgaaaatgaaaaattgcttgctaaggctaaagattttgatgtttgcaatactgaccttagaactaagaatgatatattgcatgctaaggttgttgaattaaaatcttgcaaaccctctacatctaccgttgagcacacttctatttgcactagatgtagagatattgatgttaatgctattcatgatcacatggctttaattaaacaacaaaatgatcatatagcaaaattagatgctaaaattgccgagcataacttagaaaatgaaaaatttaaatttgctagaagtatgctctatagtgngagacgccctggcatcaaggatgacattggcttccaaaggggagacaatgtcaaacttagtgcccctcctannaagatatctattttgttaanggcaagcctccatgcctcangataacgaggggtacattttgtaccctgccggttatcctaagagcaagattaggagaattcactttaggaagtctcactctggcccaaatcatgcttttatgtataagggtgagacatctagttctaggcaaccaacccatgctaagttgcctaagaagaaaactcctagtgcatcaaatgaacatggtctttcatttaaaacttttgatgcatcttatgttttgactaacaaatccggcaaggtagttgccaaatatgttgggggcaagcacaaggggtcaaagacttgtgtttgggtacccaaagttcttatgtctaatgccaaaggacccaaaaccatttgggtacctaaagtcaagaactaaacttgttttgtaggtttatgcatccggtggctcaagttggataatcgacagcgggtgcacaaaccatatgacaggggagaagaagatgttctcctcctatgagaaaaaccaagatccccaacgagctatcacattcggggatggaaatcaaggtttggtcaaaggattgggtaaaattgctatatctcctgaccattctatttccaatgtttttcttgtagattctttagattacaatttgctttctgtatctcaattatgcaaaatgggctacaactgtcttttcactaatgtaggtgtcactatctttagaagaagtgatgattcaatagcatttaagggagtgttagagggtcagctatacttggtgaattttgataaagctgaactcaacacttgcttaattgctaagactaacatgggttgactctggcaccgccgactagcccatgttgggatgaagaatcttcataagcttctaaagggagaacacattttaggattaacagatgttcattttgagaaagacagggtttgtagcgcatgccaagcaggaaagcaagttggtgcccatcatccacacaagaacatcatgacgaccgacaggccgcttgagctactccacatggatctattcggcccgattgcttacataagcatcggcgggagtaagtattgtcttgtaatagtggatgattattctcgcttcacttgggtgtctttttacaggaaaaatcacaaacccaagagaccttaaagggattcttgagacgggctcaaaatgagttcggcttaaggatcaagaaaataagaagcgacaatgggacggagttcaagaactctcaaatcgaaggcttccttgaggaggagggcatcaagcatgagttctcttctccctacacgccacaacaaaatggtgtagtggagaggaagaatcgaactctattggacatggcaaggaccatgcttgatgagtacaagacttcggatcggttttgggccgaggcggtcaacaccgcttgctacgccatcaaccggttatatctacatcgaatcctcaagaagacatcctatgaactcctaaccggtaaaaagcccaatatttcatattttagagtctttggtagcaaattccgaaaacgggtgtccgggtgcatacaatgcacgagttttttccaccggaaccatttcttcgtttttcgcaacgaacatgcccaatcaactattctagatccaaaactcatgtttgggttggtttcgcgcaatttcgttgccgcacgtcaccgattccgagaacgggtgtcggggtgcacatgagttttcgccaccggaaccat

SEQ ID NO: 295 - DNA, 1703 bp, Zea mays
  source (0)...(0): Zea mays BAC clone full insert sequence contig bacb.pk243.l15.fis53
  misc_feature (1)...(1703): n = A,T,C or G
ccataggaagagcacatcggggacttgccagttctgggaaagatccttggtgtcttggacttcaaagaagcaaaattcggtcgctctttccaccgtcgaagccgagtacattgccgcaggtcattgttgcgcgcaattgctttggatgaggcaaaccctgcgggactacggttacaaattaaccaaagtccctntgctatgtgataatgagtgtgcaatcaagatggcggataatcccgtcgagcatagccgcactaaacacatagccattcggtacattttcttagggatcaccaacaaaagggagatatcgagatttcttacattaatactaaagatcaattagccgatatctttaccaagcctcttgatgaacaaacttttaacaaacttaggcatgagctcaatattcttgattcgcgcaatttcttttgctaaattgcacacatagctcttttatatacctttgatcatatctctttcatgtgctatgactaatgtgttttcaagtgaatttcaaaccaagtcataggaatattgaaagggaattggagtcttcggcgaagacaaaggcttccacttcgcaactcatccttcgtcgtcgctccaaagtcactctccatctttgggggagagagcaaaaggacttcgtctttggtataatcttaactcatttatttatgaccaaaggggaataaaggacttcaagggctctaataattccgtttttggcgattcatgccaaagggggagaaagtttgtatgagcccaaagcaaaaggaccgcaccaccaccaatttcaaaaacttagtttttcacaaagtattctcaattggtatcctattgtgttcaaaagggggagaaagtagtatttcaaaaatgatatatcaaaaccctcttgaacactaagaggaggatctcatttagggggagttttgtttagtcaaaggaaaagcatttgaaacagggggagaaaatttcaaatcttgaaaatgctttgcaaaatctcattcatttacctttgactatttgcaaaagaactttgaaaaggatttacaaaatagtttgcgaaaacaaaacatatggtgcaagcgtggtccaaaatgttaaaaacgaagaaacgatccatgcatatcttgtaagtatttatattggctcaattccaagcaacctttgcacttacattatgcaaactagttcaattatgcacttctatatttgctttggtttctgttggcatcaatcaccaaaaagggggagattgaaagggaattaggcttacacctagttcctaaataattttggtggttgaattgcccaacacaaataattggactaactagtttgctctagtgtataagttatacaggtgtaaaaggttcacacttagccaataaaaagatcaaatattggattcaacaaaggagcaaatggacaaccgaaggcacnctctggtctagggcaccggaactgtccggtgtnacaccggacagtgtccggtgcaccanccggacagtgtccggtgcaccagaggactccaactcaaacttgccaccttcgggaatttccagaggcactccgctacattcaccagacatggtccggtgtacacccggaaagtgtccggtggctccaanggaagaacaagcctccggaaattccccatcctccgggaaaaaacccccggctgggttccccattaa

SEQ ID NO: 296 - DNA, 1037 bp, Zea mays
  source (0)...(0): Zea mays BAC clone full insert sequence contig bacb.pk243.l15.fis54
caatccactactttaggtccaaaactcatgtttggggtggtttcgcgcaatttcgttgccgcacgtcaccaattccgaaaacgggtgtcggatgcatgcaaagcatgagttttcgccaccggaaccattgcttcgtttttcgcaatgaacattcccaatcgactactttaggtccaaaaactcgtgtttggggtggtttcgcgcaatttcgttgccgcacgtcacccattccgaaaacggtagtcggggtgcattaaaagcatgagttttcgccaccagaaccatttcttcgtttttcgcaacgaacatgcccaatccacaactttgggtccaaaactcatgtttggggtggtttcgcgcaatttcgttgccgcacgtcacccattccgaaagccggtgtcggggtgcatacaaagcacgagttttcgccaccagaaccatttcttcgtttttctcaacgaacatgcccaatccactactttaggtccaaaactcatgtttgggttggtttcacgcaatttcgttgccgcacgtcacccattccgaaaacgggtgtctgggtgcatatacaaagcacgagttttcgccaccggaaccatttcttcgtttttcgcaacgaacatgcccaatccactactttaggtccaaaactcatgtttggggtggtttcgcgtaatttcgttgccgcacgtcacccactctgaaaacgggtgtcggggtgctgagcacgagttttcggcaccggaaccatttcttcatttttctcaacgaacatgctcaatccactactttaggtccaaaactcatgtttggggtggtttcgcgcaatttcgttgccgcacgtcacccattccgaaaacgggtgtcggatgcatacaaagcatgagttttcgccaccgaaaccatttcttcatttttcgcaacgaacatgcccaatcgactactttaggtccaaaaatcatgtttggggtggtttcgcgcaatttcgttgccgcacgtcacccattccgaaaacggtagtcgggtgcattaaaagc

SEQ ID NO: 297 - DNA, 1681 bp, Zea mays
  source (0)...(0): Zea mays BAC clone full insert sequence contig bacb.pk243.l15.fis55
tccaaaaacaggtgtcagggtgcatacaagcacgagtttttgccaccggaaccatttcttcgttttgcgcaacgaacatgcccaatccactactttaggtccaaaactcatgtttggggtggtttcgcgcaatttcgttgccgcacgtcacccattccgaaccattttttcgctttttgcaacgaacatgcccaatccactactttaggttcaaaactcatgtttggggtggtttcgcgcaatttcgttgccgcacgtcacccattacaaaaacgggtgtcgggcggggtgcatacaaagcacgagtttttgccaccagaaccaattcttcgtttttcgcaacgaacatgcccaatccactactttaggaccaaaacacatgtttggggtggtttcacgcaatttcgttgccgcatgtcacccattccgaaaacgggtgtcggggtgcatacaaagcacgagttttcgccaccagaagcatttcttcgtttttctcaacgaacatgcccaatccactactttaggttcaaaactcatgtttgggctggtttcacacaatttcgttgccgcacgttacccattccgaaaacgggtgttgggtgcatacaaagcatgagttttcgccaccggaaccatttcttcgtttttcgcaacgaacatgcccaatccactactttaggtctgaaactcatgtttggggtggtttcgcgcaatttcgttgccgcacgtcacccattcccaaaacgggagttggggtgcatacaaagcatgagtttttgccaccggaaccatttctttgtttttcgcaacgaacatgcccaatccactactttaggtccagaactcatgtttggggtggtttcgcacaatttcgttgccgcacgtcacccattccgaaaacgggtttcggggtgcatacaaagcacgagatttcgccaccggaaccatttcttcatttttcgcaacgaacatgcccaatccactactttaggtccaaaactcatgtttggggtggttttgcgcaatttcgttgccgcacgtcacccattccgaaaacgggtgtcggggtgcatacaaaggttgagttttcgccaccggaaccatttcttcgtttttcgcaacgaacatgccccatccactactttaggtccaaaactcatgtttggggtggtttcgcgcaatttctttgccgcacgtcacccattccgaaaacgggtgtcccggtgcatacaaagcacgtgttttttccaccggaaccatttcttcgtttttcgcaacgaacatgcccaatccactattttaggtccaaaactcatgtttggggtggtttcacgcaatttctttgccgcacgtcacccattccgaaaacgggtgtccgggtgcatacaaagcacgtgttttttccaccggaaccatttcttcgtttttcgcaacgaacatgcccaatccactattctaggtccaaaactcatgtttggggtggttttgcgcaatttcgttcccgcacgtcacccattccgaaaacgggtgtcggggtgcatacaaagcacgagttttcgccactggaaccatttcttcgtttttcgcaacgaacatgcccaatccactacttgaggtccaaaactcatgtttggggtggtttcgcgcaatttcgttgccgcacgtcacccattccgaaaac

SEQ ID NO: 298 - DNA, 2445 bp, Zea mays
  source (0)...(0): Zea mays BAC clone full insert sequence contig bacb.pk243.l15.fis56
tgtgttggggtggttttgcgcaatttcgttgccgcacgtcacccattccgaaaacgggtgtcggggtgcatacaaagaacgagtttttgccaccggaaccatttctttgtttttcgcaacgaacatgcccaatccactactttaggtccagaactcatgtttggggtggtttcgcacaatttcgttgccgcacgtcacccattccgaaaacgggtgtcggggtgcatacaaagcacgagatttcgccaccggaaccatttcttcatttttcgcaacgaacatgcccaatccactactttaggtccaaaactcatgtttggggtggttttgcgcaatttcgttgccgcacgtcacccattccgaaaacgggtgtcggggtgcatacaaaggttgagttttcgccaccggaaccatttcttcgtttttcgcaacgaacatgccccatccactactttaggtccaaaactcatgtttggggtggtttcgcgcaatttctttgccgcacgtcacccattccgaaaacgggtgtcccggtgcatacaaagcacgagttttttccaccggaaccatttcttcgtttttcgcaacgaacatgcccaatccactactttaggtccaaaactcatgtttggggtggtttcgcgcaatttcgttgccgcacgtcacccattccgaaaacggtagtccgcatacaaagcatgagtttttgccaccggaaccatttcttcgtttttcacaacgaacatgcccaatccactactttgggtccaaaactcatgtttagtgtgttttcgcgcaatttcgttgtcgtacgtcacccattcccaaaacgggtgtcggggtgcatacaaagcacgacttttgccaccgaaaccaattcctcgtttttcgcaacgaacatgcccaatccacttctttaggtccaaaactcatgtttggtgtggtttcgcgctatttcgttaccgcacgtcacccattccgaaaacgggtgccggggtgcatacaaagcacgagtttttgccaccggaacgatttcttcgtttttcgcaacgaacatgcccaatccactactttaggtccaaaactcatgtttgggttggtttcgagcaatttcgttgccgcacgtcacccattccgaaaacgggtgtcagggtggatacaaagcacgagttttcgccaccggaaccatttctccgtttttcgcaacgaacatgcccaatccactactttaggtccaaaactcatgttttgggtggtttcgtgcaatttcgttgccgcacgtcaccaattccaaaaacaggtgtcagggtgcatacaagcacgagtttttgccaccggaaccatttcttcgttttgcgcaacgaacatgcccaatccaatactttaggtccaaaactcatgtttggggtggtttcgcgcaatttcgttgccgcacgtcacccattccgaaccattttttcgcttttagcaacgaacatgcccaatccactactttaggttcaaaactcatgtttggggtggtttcgcgcaatttcgttgccgcacgtcacccattacaaaaatgggtgtcgggcggggtgcatacaaagcacgagtttttgccaccagaaccaattcttcgtttttcacaacaaacatgcccaatccactactttaggtccaaaactcatgtttggggtggtttcgcgcaatttcgttgccgcatgtcacccattccgaaaacgggtgtcggggtgcatacaaagcacgagttttcgccaccagaagcatttcttcgtttttctcaacgaacatgcccaatccactactttaggtccaaaactcatgtttgggctggtttcacgcaatttcgttgccgcacgttacccattccgaaaacgggtgttgggtgcatacaaagcatgagttttcgccaccggaaccatttcttcgtttttcgcaacgaacatgcccaatccactactttaggtctgaaactcatgtttggggtggtttcgcgcaatttcgttgccgcacgtcacccattccgaaaacaggagttggggtgcatacaaagcatgagttttcgccaccgaaaccatttcttcgttttttgcaacgaacaaggtagtaaatagaactttatctaccatgcttagggctgttttagacaagaatttgagacgttgggaggattgcttgcctcatgttgaatttgcttacaatcatgccacgcattcttctacaaagatgtgccctttccagattgtttatggttacattcctagggcacctattgatttgatttcacttaatgctgcgaacgccccacatgtagatgcttctgcacatgttgaacaaatgattaccatacatgaacaaacgaaacagaacattgctgctactaatacaaaaaatcaggttgctggtagtaaaggaagaaaacatgttacttttgaacctggt

SEQ ID NO: 299 - DNA, 2292 bp, Zea mays
  source (0)...(0): Zea mays BAC clone full insert sequence contig bacb.pk243.l15.fis57
ttttcggaatgggtgatgtgcggcaacgatatagcgcgaaaccaccccaaacatgagttttggacctaaattggtggattgggcatgttcgtgcgaaaaatgaagaattggttccggtggcaaaaactcgtgctttgtattcaccccgcccgacacccgtttttgtaatgggtgacgtgcggcaatgaaattgcgtgaaaccaccccaaacatgagttttggacctaaagtattggattgagcatgttcgctgcgcaaaacgaagaaatggttccggtggcaaaaactcgtgcttgtatgcaccctgacacccatttttggaattggtaatgtgcggcaacgaaattgcacaaaatcaccccaaacatgagttttggacctaaagtagtggattgggcatgttcattgcgaaaaacgaagaaatggttccggtggcgaaaactcatgctttgaatgcacccgacacccgttttcagaatgggtgacgtgtggcaacgaaattgcgcgaaaccaacccaaacatgagttgtggacctaaagcagtggattgggcatgttcgttgcgaaaaacgaagaaatggttccggtggcaaaaactcgtgctttgtatgcaccccgacacccgttttcggaatgggtgacgtgtggcacgaaaccaccccaaacatgagtattggacctaaagctgtggatttggcaagttcgttgcgaaaaacgaagaattggttccggtggcaaaaactcgtgctttgtatgcaccccgacacccgttttgggaatggggtgacgtatgacaacgaaattgcgcgaaaccaccccaaacatgagttttggacctaaagtagtggattgggcatgttcgttgcgaaaaacgaagaaatggttccggtggagctttgtatgcaccccgacacccgttttgggaatggggtgacgtatgacaacgaaattgcgcgaaaccaccccaaacatgagttttggacctaaagtagtggattgggcatgttcgttgcgaaaaacgaagaaatggttccggtggcaaaaactcgtgttttgtatgcaccccgacacccgtattcggaattggtgacgtgcggcaacgaaattgcgcgaaaccaccccaaacatgagttttggacctaaagtagtggattgggcaagttcgttgcgaaaaacgaagaattggttccggtggcgaaacctcaagctttgtatgcaccccgacacccgttttcgaaatgggtgacgtgcggcaacgaaattgcgcaaaaccaccccaaacatgagttttggacctaaagtagtggaatgggaatgttcgttgcgaaaaactatgaaatggttccggtggcaaaaactcgtgcttggatgcaccctaacaatcgtttttggaatgggtaacgtgcggcaacgaaattgcgcgaaaccaacccaaacatgagttttggacctaaagtagtggattgggtatgttcgttgagaaaaacgaagaaatggttccggtggcaaaaactcgtgctttgtatgcaccccaacacccgtttttggaatgcgtgacgtccggcaacgaaattgcgcgaaaccaccccaaacatgagttttggacctaaagtactggaatgggcatgttcgttgcgaaaaacgaagaaatgttccggtggcgaaaactcatgatttgtatgcacccgacacccgtttttggaatgggtgacgtgcggcatcgaaattgcgggaaaccaccccaaacatgagttttggacctaaagtagtggattaggcttgtttgctgcgaaaaacgaagaaatggttccggtggcgaaaactcatgctttgtatgcacccgacacccgttttcggattgggtaacgtgcggcaacgaaattgcgcgaaaccaccccaaacatgagttttggacctaaagtagtggattgggcatgttcgttgagaaaaacgaagaaatggttctggtggcgaaaactcgtgctttgtatgcaccccgacaccggttttcggaatgggtgacgtgcggcaacgaaattgcgcgaaaccaccccaaacatgagttttggacccaaagttgtggattgggcatggtcgttgcgaaaaatgaagaagtggttccggtggcgaaaactcatgcttttaatgcaccccgactaccgttttcgggatgggtgacgtgcggcaacgaaattgcgcgaaaccaccccaaacatgatttttggacctaaagtagtcaattgggaatgttcattgcgaaaaacgaagaaatggttccggtggcgaaaactc

SEQ ID NO: 300 - DNA, 1840 bp, Zea mays
  source (0)...(0): Zea mays BAC clone full insert sequence contig bacb.pk243.l15.fis58
ggttccggtggcgaaaactcgtgctttgtatccaccttgacacccattttcggaatgggtgacgtgcggcaacgaaattgtgcgaaaccaacccaaacatgagttgtggacctaaagtagtggattgggcatgttcattgcgaaaaacgaagaaatggttccggtggcaaaaactcgtgctttgtatacaccccgacaccctttttcggaatgggtgacgtgcggcgacaaaatagcgcgaaaccacaccaaacatgagttttggacataaagtagtggattaggcatgttcgtagcgaaaaatgaagaattggttccggtggcaaaagtcgtgctttgtatgcaccccgacacccgttttggaaatgggtgacgtacgacaacgaaattgcgcgaaaccacaccaaacatgagttttggacctaaagtagtggattgggcatgttcgttgcgaaaaacgaagaaatggttccagtggcgaaaactcatgctttgtatgcacctcgacacctgttttcggaatatgtgacgtgccgcaacgaaattgcgtgaaaccaccccaaacatgagttttggacctaaagtagtggattgggcatgttcattgtgaaaaacgaaaaatggttccggtggcgaaaactcgtgctttgtatccaccttgacacccattttcggaatgggtgatgtgcggcaacgaaattgtgtgaaaccaacccaaacatgagttgtggacctaaagtagtggattgggcatgttcattgcgaaaaacgaagaaatggttccggtggcaaaaactcgtgctttgtatgcaccccgacaccctttttcggaatgggtgacgtgcggcgacaaaatagcgcgaaaccacaccaaacatgagttttggacataaagtagtggattaggcatgttcgtagcgaaaaatgaagaattggttccggtggcaaaagtcgtgctttgtatgcaccccgacacccgttttggaaatgggtgacgtacgacaacgaaattgcgcgaaaccacaccaaacatgagttttggacctaaagtagtggattgggcatgttcgttgcgaaaaacgaagaaatggttccagtggcgaaaactcatgctttgtatgcacctcgacacctgttttcggaatatgtgacgtgccgcaacgaaattgcgtgaaaccaccccaaacatgagttttggacctaaagtagtggattgggcatgttcattgtgaaaaacgaaaaatggttccggtggaaagaactcgtgctttatgtgcaccccgacacccgttttcggaatgggtgacgtgaggcaacgaaattgcgcgaaaccaccccaaacatgagttttggatctaaagcagtggattgggcattttcgttgcgaaaaacgaagaaatggttctggtggcgaaaactcatgctttgtatgcaccccgacacccgctttcagaatgggtgacgtgcggcaacgaaattgcgcgaaaccaccccaaacatgagttttggacccaaagttgtggattgggcatgttcgttgcgaaaaacgaagaaatggttctggtggcgaaaactcatgcttttaatgcaccccgactaccgttttcggaatgggtgacgtgcggcaacgaaattgcgcgaaaccaccccaaacacgagtttttggacctaaagtagtcgattgggaatgttcattgcgaaaaacgaagcaatggttccggtggcgaaaactcatgctttgcatgcatccgacacccgttttcggaattggtgacgtgcggcaacgaaattgcgcgaaaccaccccaaacatgagttttggacctaaagtagtggattgg

SEQ ID NO: 301 - DNA, 1357 bp, Zea mays
  source (0)...(0): Zea mays BAC clone full insert sequence contig bacb.pk243.l15.fis59
tagtggattgggcatgttcgttgtgaaaaacgaagaaatggttccggtggcaaaaactcatgctttgtatgcaccccggactaccgttttcggaatgggtgacgtgcggcaacgaaattgcgcgaaaccaccccaaacatgagttttggacctaaagtagtggattgggcatgtttgttgcgaaaaacgaagaaatggtttctgtggcgaaaactcatgcttaggggtgtaatcggatcggatacggacggatatcaatgaaaccatatttgttttcatatttttagtcggaatcgaatgcggatagcttcgaatacgaatacaaatacggatgttctcgaatacaaaaacggatagtcgtggatcgaatgcggagctaatcagacacggatagcgtcggtaacgaatatttttgtcggatatcgtgtaagacaccattccacacatatcatagttgtaatcatttagcccctcctttagtccaaacatttttgaggattatatgtgcacacatgctacaccttcataaaaatccatgaatttctaaggctattttgagtattattaatttctttatgtagaaaatcattaaaatgtaattaaattcataaaatattgataactatgatatatggtttcacatgttattatgatatgtggtttcacttattattatggtggtttcacatgtaatcattacgggtttcacaaataagtggaaatgaaatgaaataattgatgacatcttgtggtttttatagttcaaacatttttgaggatgctatatggacatatgttactcatacgccaaattttgtgaatttctgagactatttgtatattattaatttctttttgcagaaaatcatcaaaatgcatttaaatccataaaatattatagtatcgaccaaaaattgcaaataagttatcaagactaataaacattccataagaagataacctcaagtccctacatgaaaatgagaaagtgaagtaaaggttatgttgaaacttggtgtcggggaccataattaggggtaccctcaaggctcctaattctcagctggtaacccccatcagcataaagctgcaaaggcctgatgggtgcgattaagtcagggatcagtccattcgagggactcgatcatgcctcgcccgagcctagcctcggacaagggcaaacgaccccggaggatctccgtctcgcccgaggcccccctccagcggcgaacatatttccggctcgcccgaggccctgtcttcgccaagaagcaaccctgaccaaatcgccgcaccgaccgaccaaatcgcaggagcatttaatgcaaaggtggcctgacaactttatcctgatgcg

SEQ ID NO: 302 - DNA, 1801 bp, Zea mays
  source (0)...(0): Zea mays BAC clone full insert sequence contig bacb.pk243.l15.fis60
cctgcggagtaaccacataaccaagaaacgagacacgttgcgtgcaaaatgtgcacttttccatgttaccaaacaagcgagcagcacgcaaagcatcaaaaacagcacgcaaatgttctaaatgctcctctatagacttgctgtaaataaggatatcatcgaaataaacagcaacaaacaaacctatgaaggcccgtagaacttcattcattaaacgcataaaggtgctgggagcattagtcaatccaaatggcataaccaaccattcatataaaccaaatttcgttttaaaagccgttttccattcatcaccgagtttcattctaatctgatggtaaccgctacgcaaatcaaccttagagaaaataacggcaccactaagctcatctaacatatcatcaaggcgtggaataggatatcgataacgaactgtgatgttattaatagcacgacaatctacgcacatacgccatgacccatctttctttggaacgagtaaaacaggaaccgagcaagggctaagagactcacgaatgtaacctttatcaagcagcgtctgcacctggcgctggatctccttcgtctcatctggatttgtacggtacggggcgcggttcggaagagaagcgccggggatgagatcgatctgatgctcaatgccacggaggggaggaagacccggtggtaagtccgtaggaaaaacatcaacatactcctgcaaaaggttaacaacagcagggggtatatccaaagacggtgcatcatcaagcggaacaagcatgcgcgagcatacaagtgcataacagggcatatgagcttcatggagatcatcaaaatcagcacgagtagcaagtaaaacaggagagtgcaacttgatttcagatttaataggtgcggctgatgttgatttgacttgttgtgcagttttagcagccctagtaaggtcatctttcaaaatttggtcaggggtcattggatgtataattattttctggcctttaaacatgaaagaataatgatttgaacgaccatgatgtaaactatcagtatcatattgccaaggccgacctaataacaaagagcatgcttccataggaataacatcgcaatcagcataatcagaataagaacccaacgaaaaggggacacgtaccgaacgtgttacctttattttaccaccatcattaagccattgaatgtgatacggatgtggatgtgtgcgagtgggcaaggataatttctctaccaacgctgtacttgccaaattgttgcagctgccactatcgatgatgatgcgaatcgaccgttcgtgcacgacgcccttggtatggaatagagtgtgtcgctgatttttttcggcctgggcaacctgtgtgctgagaacacgctgcacaacaagactctcatacctatctgcgtcgatgggatcaacatggacttcctcattttctgcatggttagtggcaatcatagcatgactagtttcctcagaatcactggctgaagagtactcaccattgtctcgtataagcaaggtacgcttgtttgggcagtcccaaatcatgtgcccaaaccctctgcaacgatggcactgaatatcccgtgtacgtcctgtggaagaagcggcgcctttggcaggtggcgccactggcttggtcgtccctgtgcgcgatgtagtgctaggcgtagaaggtgcagggctggaaggagttgagctgtgtgttggaccccggcctgcaaaagagttagtatatgtctttgatcgtcgtccctgcacttcacgttcagctttgcaagcata

SEQ ID NO: 303 - DNA, 1524 bp, Zea mays
  source (0)...(0): Zea mays BAC clone full insert sequence contig bacb.pk243.l15.fis61
tccaacatttccaaccaagcaagcacatcatcaaatttaaagatatacttggttgaggagcacacgctagagtcgaggacgactctattacaagaaggggaggatgatgaggacatcactgccatcaatacaaccacaccagcgacccccttcaccatttaatcatggaccagtgaaacgagtccgtgcatgtaaatttaattatcaggtgaactcgttccttgttgaagctaatcattccttaaatgaggtactaataccttgtgattactttattatgctaaggtgtttgggaggtgaaccatctagaatttgagaagtcaacaaggcaataaaagctgctccacttgatgggattttgtaactgcagcaagtgcaagttgaagaggccatatctttcaactcccaaggccaatgaaggcaaataagcacttgatggaaagcactcttcgtctacttcttggtggagaaataatcaattagagataccaaataaggcgtccagaaactgtcgagagaacttcttgactccaccagtccgagggaattcgtaactgcagcaagcaccatattaaatggagcatatctttcatctcctaaggttgtttagtgcaaataagtacttgttggaaagctctcttcgtctactttctggcggctgaagaatcaatgggagaaaccaaacgacacgtccagaaactgtcgagagagcttcgttctccaccagaacttctttctattcctctatttaagcaactagcagccaccaaagaacttgggttttttgtttgatgtaagtttagcctttggtacttccttgtaaacgcgtgtgtcggctagaccacccggatacttgaaacagaaccccaactctatcagatccgtgagcgtctgctttttatcttgttcttgcttgttctcgattgcttgcaggttcaaggttgttcttggcacggcaacagcagcaacaacaggagccagtgtaactatcgctaaggtgcagcacccttgtggttgttgtagtcggatagcacaacgtcgacctccaccccaaatcgtagttatcaggagacgatgtacctgtcgctcaaggcgccacaccatcttggttgtggtagtcgggcagccaacgtcgttctccaacaagttttccacctccatcatctctcatcgaaagatcgggcacccttctacccattgggtttatcgtagtgcatgttcaatttcttcagaatcactagcggaagagtactcaccatcgtcacgaatgagcaaagtgcgcttgtttgggcagtcccgaatcacatggccaaatcctctatagcgatgacactgaatatcccgtgtacgacctgtgggtggggcagtgctggctggtttggtcgtcttctcgagtggagtagtggtggacgtggatggcgcagggggaactggtgctgaggtggatgtcgagcttcgtcctgcaaaagggttagaatatggcttcgagcggcgtccctgcacttcacgttcagctttgcaagc

SEQ ID NO: 304 - DNA, 1436 bp, Zea mays
  source (0)...(0): Zea mays BAC clone full insert sequence contig bacb.pk243.l15.fis62
atcgattaacttgattcggaatgggtgacgtgcggcaacaaaattgcgcgaaaccaccccaaacatgagttttggacctaaagtagtagattgagcatgttcgttgagaaaaatgaagaaatggttccggtgccgaaaactcgtgctcagcaccccgacacccgttttcagagtgggtgacgtgcggcaacgaaattgcgcgaaaccaccccaaacatgagttttggacctaaagtagtggattggacttgttcgctgcgaaaaacgaagaaatggttccggtggcgaaaagtcatgctttgtatgcacccgacacccgttttcggaatgggtaacgtgcggcaacgaaattgcgcgaaaccaccccaaacatgagttttggacctaaagtagtggattgggcatgttcgttgagaaaaacgaaaaaatggttccaatggcgaaaactcgtgctttgtatacaccccgacaccagcttttggaattggtgacgtgcggcaacgaaattgcacgaaaccaccccaaacatgagttttggacctatagtagtggattgggcatgttcgttgcgaaaaacgaagaaatggttccggtggcgaaaactcgtgctttgtatccacaatgacatccgttttcggaatgggtgacgtgcggcaacgaaattgcgcgaaaccaacccaaacatgagttttggacctaaagtagtggattgggcatgtttgttgcgaaaaacgaagaaatggtttcggtggcaaaaactcgtgctttgtatgcaccccgacatccgttttcggaatgggtgacgtgcggcaacgaaatagtgcgaaaccacaccaaacataagttttggacctaaagtagtggattgggcatgttcgttgcgaaaaacgaagaattggttccggtggcaaaagtcgtgctttgtatgcaccccgacacacgtttggggaatgggtgacgtacgacaacaaaattacgcgaaaccgcaccaaacatgagttttggacccaaagtagtggattgggcatgttcgttgcgaaaaacgaagaaatggttccggtggcgaaaactcatgctttgtatgcaccccgactcccgttttcggaatggttgatgtgcggcaacgaaattgcacaaaaccaccccaaacatgagttttggacctaaagtagtggattgggcatgttcgttgcgaaaaacgaagaaatggttccggtggcgaaaactcatgctttgtatgcacccgacacccgttttcggaatgggtgacgtgcggcaacgaaattgcgtgaaaccaccccaaatatgagttttggacctaaagtagtgtattgggcatgttcgttgcgaaaaatgaagaaatggttccggtggcgaaaactcatgctttgtatgcacccccgactcccgttttcggaatgggtgacgtgcggcaa

SEQ ID NO: 305 - DNA, 2341 bp, Zea mays
  source (0)...(0): Zea mays BAC clone full insert sequence contig bacb.pk243.l15.fis63
tttttctcaacgaacatgcccaatccactatttaggtcaaaaactcatgtttggggtggtttcgcgcaatttcgttgccgcacgttacccattccgaaaacgggtgtcggggtgcatacaagcacgagtttttgctaccggaaccgtttcttcgttttttgcaacaaacatgcccaatccactactttaggtccaaaactcatgtttggggtggtttcgcgcaatttcgttgccgcacgtcacccattccgaaaacgggtgtcggatgcatgcaaagcatgagttttcgccaccggaaccattgcttcgtttttcgcaatgaacattccccatcgactactttaggtccaaaaatcatgtttggggtggtttcgcgcaatttcgttgccgcacgtcacccattccgaaaacgggagtcggggtgcattaaaagcatgagttttcgccactagaaccatttcttcgttttttgcaacaaacatgcccaatccacttctttaggtccaaaactcatgtttggggtggttccgcgctatttcgttgccgcacgtcacccattccgaaaacgggggtcggggtgcatacaaagcacgagtttttgccaccggaaccatttcttcgtttttgcaacgaacatgcccaatccactactttaggtctaaaactcatgtttgggttggtttcgcgcaatttcgttgccgcacggaacccattccgaaaacgggtgtcagggtggatacaaagcacgagttttcgccaccggaaccatttcttcgtttttcgcaacaaacatgcccaatccactactttaggtccaaaactcatgtttggggtggtttcgcgcaatttcgttgccgcacgtcaccaattccgaaaacgggtgtcggatgcatacaaagcatgagttttcgccaccgaaaccatttcttcgtttttcgcaacgaacatgcccaatccactactttaggtccaaaactcatgtttggtgtggtttcgcactatttcgttgccgcacgtcacccattccgaaaacgggtgtcggggtgcatacaaagcacgagtttttgccaccgaaaccatttcttcgtttttcgcaacgaacatgcccaatccactactttaggtccaaaacttatgtttggggtggtttcgcgcaatttcgttgccgcacgtcacccattccgaaagctggtgtcggggtgtatacaaagcacgagttttcgccattggaaccatttcttcgtttttctcaacgaacatgcccaatccactactttaggtccaaaactcatgtttggggtggtttcgcgcaatttcgttgccgcacgttacccattccgaaaacgggtgtcgggtgcatacaaagcatgacttttcgccaccggaaccatttcttcgtttttcgcaacgaacaagtccaatcgactactttaagtccaaaaatcatgtttggggtggtttcgcgcaatttcgttgccgcacgtcacccactccgaaaacggtagtcggggtgcattaaaagcatgagttttcgccaccagaaccatttcttcgtttttcgcaacgaacatgcccaatccacaactttgggtccaaaactcatgtttggggtggtttcacgcaatttcgttgccgcacgtcacccattccgaaagccggtgtcggggtgcatacaaagcacgagttttcgccaccagaaccatttcttcgtttttctcaacgaacatgcccaatccactactttaggtccaaaactcatgtttggggtggtttcgcgcaatttcgttgccgcacgttacccattccgaaaacgggtgtcgggtgcatacaaagcatgagttttcgccaccggaaccatttcttcgtttttcgcagcgaacaagcctaatccactactttaggtccaaaactcatgtttggggtggtttcgcgcaatttcgatgccgcacgtcacccattccgaaaacgggtgtcgggtgcatacaaatcatgagttttcgccaccggaaccatttcttcgtttttcgcaacaaacatgcccaatccactactttaggtccaaaactcatgtttggggtggtttcgcgcaatttcgttgccgcacgtcacccattccgaaaacggtagtgggggtgcatacaaagcatgagttttcgccaccggaaccatttcttcgtttttcacaacgaacatgcccaatccactactttgggtccaaaactcatatttggtgtgttttcgcacaatttcgttgtcgtacgtcacccattcccaaaacgggtgtcgaggtgcatacaaagcacgacttttgccaccggaaccaattctttgtttttttgca

SEQ ID NO: 306 - DNA, 2177 bp, Zea mays
  source (0)...(0): Zea mays BAC clone full insert sequence contig bacb.pk243.l15.fis64
gctttaggtccaatactcatgtttggggtggtttcgtaccacacgtcacccattccgaaaacgggtgtcggggtgcatacaaagcacgagtttttgccaccggaaccatttcttcgtttttcgcaacgaacatgccaatccattactttaggtccaaaactcatgtttgcggtgatttctgcgcaatttcgttgccgcacgtcacccattccgaaaacgggtgtcggggtgcatacaaagcttgagtttttgccaccggaaccatttcttcgtttttcgcaatgaacatgcccaatccactactttaggtccaaaactcatgtttggggtggtttcgcgcaatttcgttgccgcacgtcacccattccgaaaactggtgtcggggtgcatacaaagcttgagtttttgccaccggaaccatttcttcgtttttcgcaatgaacatgcccaatccactagtttaggtccaaaactcatgtttggggtggtttcgcgcaatttcgttgccgcatgtcacccattccgaaaacgggtgtcgggcggggtgcatacaaagcacgagttttttccaccggaaccatttcttcgtttttcgcaacgaacatgtccaatccactacattaggtccaaaactcatgtttggggtggtttcgcgctatatctttgccgcacgtcacccattacgaaaacgggtgtcggggtgcatagaaagcacgagtttttgccactggaaccatttcttcgtttttcgcaacgaacatgcccaatccactactttaggtccaaaaatcacgcgcaatttcgttgccgcacgtcacccattccgaaaacgggtgtcggggtgcatacacaacacgtgttttcgccaccggaaccatttcttcgtttttctcaacgaacatgcccaatccactactttaggtccaaaactcatgtttggggtggtttcgcgctatatcattgccgcacgtcacccattccgaaaacgggtgtcggggtgcatacaaagcacgagtttttgccaccggaaccatttcttcgtttttcgcaacgaacatgcccaatccacttctttaggtccaaaactcatgtttggtgtggtttcgcgctatttcattgctgcacgtcacccattccgaaaacgagtgtcggggtgcacacacagcacgagttttcgccaccggaaccatttcttcgtttttctcaacgaacatgcccaatccactactttaggtccaaaactcatgtttggggtggtttcgcgcaatttcgttgccgcacgttacccattccgaaaacgagtgtcggggtgcatacaaagcacgagtttttgccactggaaccttttcttcgcttttcgcaacgaacatgcccaatccactactttagctccaaaactcatgtttggggtggtttcgcgctatatcattgccgcacgtcacccatttcgaaaacgggtgtcgtggtgcatacaaagcacgagtttttgccaccggaaccatttcttcgtttttcgcaacgaacatgcccaatccactgctttaggtccaaaactcatgtttggggtggtttcgcgcaatttcgttgccgcacgtcacccattacgaaccatttttttgctttttgcaacgaacatgcccaatccactactttagatccaaaactcatgtttggggtggtttcacgcaatttcgttgccgcacgtcacccattacaaaaacgggtgtcgggcggggtgcatacaaagcactagtttttgccaccggaaccaattcttcgtttttcgcaacgaacatgcccaatccactactttaggtcgaaaactcatgtttggggtggtttcgcgcaatttcgttgatgcatgtcacccattccgaaaacgggtgtcggggtgcatacaaagcaagagttttcgccaccagaaccatttcttcgtttttcgcaacgaacatgcccaatccactactttaggtctaaaactcatgtttggggtggtttcgcacaatttcttttgcggcacgtcacccattccggaaacggggagtgggggtgcatacaaagcatgagtttttcgccacggaaacattttcttcgtttttccgcaccgaacatgccccattccacctaactttggggcccaaaactccatgtttggggtgggtttcccgcaatttcct

SEQ ID NO: 307 - DNA, 2609 bp, Zea mays
  source (0)...(0): Zea mays BAC clone full insert sequence contig bacb.pk243.l15.fis65
  misc_feature (1)...(2609): n = A,T,C or G
caaggcgctcacactagtgctgttatcaagttcttatccgttcttaccaagccacagtggtgaactgcaaccaacaggtggaaccggtgaaagattggatgagcgattgcgtggagaaacagaaacctgctcgtcgtagaaatatgtggagttgtgggtaggctgcactcaagtcaaggattagcacgatcaaacaataatgcaaagttgaattatagtgcaaaacacgaaactatattgctggccacaggtgcaaaggatggatggaactagcagaaaggcagtaccgtaaatattgtactagtgatgccaaaaaggcactagtagaaatcacaggtgattttgtttttcttttttgtatgattttttgatatttttctcagcacaagaagcaacaagataggagctacacgaagtttcacctaaaacagatatcagatgtggtctacagaaaatcaggaagttctctgaaaagcgtgcgagaactttgacggatttttttctttattttcctgaatttttttgacaattttgtcgaaccccaaacagaccgtaggtaagtttggccggcctcagaatggtgtcaactagctcctgtaaaaatttcagattttttggacacccgagcgaaaagttatgcccggtttacggaaggtacctcaagttatgttctaaaaacgaccgggatgaaacaacagtatcctttctccttcgttatcttttttttctgtttttttgacgtaaccgaaggagaaaaacaaggaaggttgactcggtttgttttttttctgttttttttttcgtaaccgaaggagaaaatcaaggaaacggccgttgactcggtttgttttttctgttttttttgacgtaaccgaaggagaaaaataaggaaacgatgttgactcggtttgtggcgtgatcaaacgggagatggtggcggcgctagggtttgaatggtggaagaacacaatgcaaccagcaacaaatgacgcgaaagcacacaaattcaacaatgcagattattgaaagaaagtgcgaggctcaaaagggtgctgggataagatctaacctgaatttttatgtggttttgtggactgtaggaaaaaaacgctcgataaactcaccgatcaacctggaaatctgataccaattgatgtagctgaggtgcccgatctttcggcgagtagagataattccgatttggcggaagatgacccttgcgatccgactacgacgagcaagcccgaggcgccaatgcaatcgctgaaccaactccctgtggttaccgaccttgctgatgcgagatcggcctgatcacgaagatcgtttcctgtgcgcaatcgaagaacgaacaagaacaagatgcgagcaatctaatctattactcgagggtggagttctgaatacacgaagacagcgcagatttgcgcgtgttcgagagtagctaaggctaacgtaaaacaaaacttaggaaataaaggaggcgcagctcctgtataaatagagagggggcgcagcccctaggggcggcncaaccctaggtcgtccattatgggccgcaattgggctggtcgtctattcttccgggccttcgttctttaacaacatgatgtagttcaattctcttgcacgggcccgagtcactggcccaggtggaaggggtggcgcctgggctggagaaggtgctgctggtgtagatgtgctcgtgttggtgttgatgtccgcatcagtacccaaacaaatctgaaccgtcgtcatgctaaatgggtagaattcattgagtcctttccttacattattaaacacaagaacgggaaggataatgttattgctgatgctttgtctcgtcgctataccatgctgccacagttagattttaaaatctttggtttgcacactgtgaaagatcaatatgttgacgatgctgattttaaagatgcttttggccattgtattaatgggaaaccatggggcaaatttcacatacaggatgggttcctgtttcacgctaacaagctgtgtgttccagctagctcggttcgtcttttgttgttacaggaagcgcatggaggcggtctcatggggcactttggcgtctacaagacacatgaggtgttgactgcccacttcttttggcctcggatgtgcgctgatgttgagcgccttgttgcacgttgcactacttgtcagaaagctaagtcacggttgaacaaccatggtttgtatatgcctttgcctgttcctacttccccttggattgatatttcgatggattttgttttgggattgcctagaactaagaaggggagggatagcatttttgtggttgttgatcgattctccaaaatggctcatttcataccttgtcataagactgatgatgctagcaatgttgctgaattgttttttagagagattattcgtttgcacgatatttccaatacaatagtctcggatcgtgatgctaagtttctcagtcatttttggagatctctgtggaataaattgggaactaaattgctgtttagcaccacttgtcaccctcagactgatggtcaaactaaggtagttaatcgaactttgtctaccatgcttagggctgttttaat

SEQ ID NO: 308 - DNA, 1892 bp, Zea mays
  source (0)...(0): Zea mays BAC clone full insert sequence contig bacb.pk243.l15.fis66
ctttaggtccaaaactcaagtttggggtggtttcgcgcaatttcgttgtcgtacgtcagcccattcccaaaacgggtgtcagggtgcatacaaagcacgagtttttgcaaccggaaccaattcttcgtttttcgcaacgaacttgcccaatccactactttaggtccaaaactcatgtttggggtggtttcgcgccgcacgtcacccattccgagaacgggtgtcggggtgcatacaaagcatgagtttttccaccggaaccatttcttcgtttttcgcaacaaacatacccaatccactactttaggtccaaaacacatgtttggggtggtttcgcgcaatttcgttgctgcacgtcacccattccgaaaacgggtgttggggtgcatacaaagcacgagtttttgccaacggaaccatttcttcgtttttcccaacgaacatgcccaatccacaacattaggtccaaaactcatgtttggcgtggtttcgcgcaattttgttgccgcatgttacccattccgaaaacgggtgtcggggtgcatacaagcacgagtttttgccaccggaaccatttcttcgtttttcacaacgaacatgcccattccactactttaggtccaaaagtcatgtttggggtggttttgcgcaatttcgttgccgcacgtcacccattccgaaaactggtgtcgggttgcatacaaagtttgagttttcgccaccggaaccatttcttcgtttttcgcaatgaacatgcccaatccactagtttaggtccaaaactcatgtttggggtggtttcgcgtaatttcgttgccgcatgacacccattccgaaaacgggtgtccgggtgcatacaaagcacgagttttttccaccgaaaccatttcttcgtttcgcgcaatttcgttgccgcacgtcaccgattccgagaacgggtgtcggggtgcacatgagttttcgccaccggaaccatttcttcatttttcgcaacgaacatgcccaatccactactttaggtccaaaactcatgtttgggtggtttcgcgcaatttcgttgccgcacgtcacccattccgaatacgggtgtcggggtgcatacaaagcacgagtttttgccaccggaaccatttcttcgtttttcgcaacgaacatgcccaatccactactttaggtccaaaactcatgtttggggtggtttcgcgcaatttcgttgtcatacgtcaccccattcccaaaacgtgtgtcggggtgcatacaaagcacgagtatttgccatcggaaccaattcttcgtttttcgcaacgaacttgccaaatccactgctttaggtccaatactcatgtttggggtggtttcgtgccacacgtcacccattccgaaaacgggtgtcggggtgcatacaaagcacgagtttttgccaccgaaaccatttcttcgtttttcgtaacgaacatgccaatccattactttaggtccaaaactcatgtttggggtggtttcgcgcaatttcgttgtcgcacgtcacccattccgaaaacgggtgttggggtgcatacaaagcacgagtttttgccaccggaaccatttcttcgttttcccaacgaacatgcccaatccactactttaggtccaaaactcatgtttggtgtggtttcacgcaatttcgttgccgcactttacccattccaaaaacgggtatcggggtgcatacaagcacgagtttttgccaccggaaccatttcttcgtttttcacaacgaacatacccattccactactttaggtccaaaactcatgtgttggggtggttttgcgcaatttcgttgccgcacgtcacccattccgacaacgggtgtcggggtgcatacaatggttgagttttcgccaccg

SEQ ID NO: 309 - DNA, 1913 bp, Zea mays
  source (0)...(0): Zea mays BAC clone full insert sequence contig bacb.pk243.l15.fis67
gaacatgcccaatccactactttaggtccaaaactcattttggggtggtttcgcgcaatttcgttgtcgtacgtcacccattcccaaaacgggtgtcggggtacatacaaagcacgagtttttgccaccggaaccacttcttcgtttttcgcaacatacatgcccagtccactactttaggtccaaaactcatgtttggggtggtttcgcgctatatcgttgccgcacgtcacccatttcaaaaacgggtgtcggggtgcatacaaagcatgagtttttgccaccggaaccatttcttcattttccgcaacgaacaagctcaatccactactttaggtccaaaactcatgtttggggtggtttcgcgcaatttcgttgccgcacgtcacccattccgaaaagggaaatttggatccataccattaaaagatcaccactttggatccataccattgctatctcacttacatgtgggtccacatgagtcaatgacatgtggggtccatggtatatatctaaagtttggatcttttaatggtatagatccaattgttcctttcgaaaatgggtgttgggggtgcatacaaagcatgagttttcgccaccggaaccacttcttcgtttttcgcaacgaacatgcccaatccactactttaggtccaaaactgatgtttggggtggtttcgtgctatatcattgccgcacgtcaccaatttcgaaaacgggtgtcgtggtgcatacaaagcacgagtttttgccaccagaaccatttcttcgtttttcgcaacgaacatgcccaatccactactttaggtccaaaactcatgtttggggtggtttcgcgcaattttattgccgcacgtcacccattccgaaaacgggtgtcggggtgcatacaaagcatgagttttcgccaccggaaccatttcttcgttttcgcaacgaacatgcccaatccactactttgggtccaaaactcatgtttggtgtggtttcgcgctatttcgttgccgcacgtcacccattccgaaaacgggtgtcggggtgcatacaaagaacgagttttcgccaccggaactatttcttcgtttttcacaacgaacatgcccaatccactactttaggtccaaaactcatgtttgggctggtttcacgctatttcgttgccgcatgttacccattccgaaaacgggtgtcggggtgcatacaagcacgagtttttgccaccggaaccatttcttcatttttctcaacgaacatgcccaatccactatttaggtcaaaaactcatgtttggggtggtttcgcgcaatttcgttgccgcacgttacccattccgaaaacgggtgtcggggtgcatacaagcacgagtttttgctaccggaaccgtttcttcgttttttgcaacaaacatgcccaatccactactttaggtccaaaactcatgtttggggtggtttcgcgcaatttcgttgccgcacgtcacccattccgaaaacgggtgtcggatgcatgcaaagcatgagttttcgccaccggaaccattgcttcgtttttcgcaatgaacattcccaatcgactactttaggtccaaaaatcatgtttggggtggtttcgcgcaatttcgttgccgcacgtcacccatcccgaaaacggtagtcggggtgcattaaaagcatgagttttcgccactagaaccatttcttcgtttttcgcaacgaacatgcccaatccacaactttgggtccaaaactcatgtttggggtggtttcgcgcaatttcgttgccgcacgtcacccattccgaaaacgggtgtcggggtgcatacaaagcacgagttttcgccactagaaccatttcttcgtttttctcaacgaacatgcccaatccactactttaggtccaaaactcag

SEQ ID NO: 310 - DNA, 3265 bp, Zea mays
  source (0)...(0): Zea mays BAC clone full insert sequence contig bacb.pk243.l15.fis68
accattttttcgctttttgcaacgaacatgcccaatccactactttaggttcaaaactcatgtttggggtggtttcgcgcaatttcgttgccgcacgtcacccattacaaaaatgggtgtcgggcggagtgcatacaaagcacgagtttttgccaccagaaccaattcttcgtttttcacaacaaacatgcccaatccactactttaggtccaaaactcatgtttggggtggtttcgcgcaattttgttgccgcacgttacccattccgacaacgggtgtcggggtgcatacaagcacgagttttcgccaccggaaccatttcttcgtttttcgcaacgaacatgcccaatcctctactttaggtccaaaactcatgtttggggtggtttcgcgtaattttgttgccacacgtcactcattccgaaaacgggtgtcagggtgcatacaaagcacaagtttttttccaccggaaccatttctttgtttttttgcaacgaacatgcccaatccactactctaggtccaaaactcatgtttggggtgatttcgcgcaatttcgttgccgcacgtcacccattccgaaaacgggtgtcgagatgcatacaaagcatgagttatcgccaccggaaccatttcttcgtttttcgcgacgaacatgcccaatccaatactttgggtcccaaactcatgtttggtgtggtttcgcgcaatttcgttgtcgtacgtcacccattcccaaaacgggtatcggggtgcatacaaagcacgacttttgccaccggaaccagttcttcgttttcgcaacgaacatgcccaatccactactttaggtccaaaactcatgtttggtgtggtttcgcgctatttcgttgccgcacgtcacccattccgaaaacgggtgtcggggtgcatacaaagcacgagtttttgccactagaactatttcttcatttttcgcaacgaacatgtccaatccactactttaggtccaaaactcatgtttgggttggtttcgtgcaatttcgttgccgcacgtcacccattctgaaaacgggtgtcgaggtgcatacaaagcacgagtttttaccaccggaaccaattcttcgtttttcgcaacgaatatgcccaatccactaatttagatccaaaactcaagtttggggtggtttcgcgctatatcgttgacgcacgtcacccattccgaaaacgggtgtcggggtgcatacttagcaccagtttttgccaccggaactatttctttgtttttcgcaacggacatgcccaatccactactttaggtccaaaactcatgtttggggtggtttcacgcaatttcgttgctgcacgtcacccattccgaaaacgggtgtcggggtgcatacaaagcacgagtttttgccaccggaaccatttcttcgtttttcgcaacgaactggcccaatccactactttaggtccaaaactcatgtttgggttggtttcgcgcaatttcgttgccgcacgtcacccattccaaaaacgggtgtcagggtggatacaaagcacgagttttcgccaccgaaaccatttttcgtttttcgcaacgacataaccaatccactactttaggtccaaaactcatgtttggggtggttttgtgcaattttgttgccggacatcaccaattccaaaaacgggtgtcagggtgcatacaagcacgagtttttgccaccggaaccatttttcgttttgtgcaacgaacatgcccaatccaatacttttggtccaaaactcatgtttggggtggtttcgcgcaatttcattgccgcacgtcacccattacaaaaacgggtgtcgggcggggtgcatacgaaggaagagtttttaccaccggaaccaatttttcgtttttcgcaacgaacatgcccaatccactaatttaggtccaaaactcatgtttggtgtggtttggcgctatatcgttgccgcacgtcacccattccgaaaacgggtgtcggggtgcatatttagcatgagtttttgccaccggaaccatttctttgtttttcgtaacgaacatttccaatccactactttaggtccaaaactcatgtttggggtggtttcacgcaatttcgttgccgcacgtcacccattccgaaaacgggtgtcggggtgcatacaaaccacgagttttcgccaacggaaccatttcttcgtttttctcaacgaacatgcccaatcgactactttaggtccaaaactcatgtttggggtggttttgcgcaatttcgttgccgcacgtcatgatagagctagagtgcccgatctttcggtcagtggagataattccgatttggtggaagtagaccctcacgatccgactacgatgagcgaacccgaagcgccaatgcaatcgctgaaccaactcccaatggttaccgaccttgttgatgcgagatcggcctgatcatgaagatcgtttcctgtgcgcaatcgaagaacgaacaagaaaaagatgcgagcaatcttaatatcactcgaggtggagttctgaatcacagaggacagcacgtatttgtgcgtgttctagggcagctaaagctagatgtaaaacaaaactcaagttctaaataaaacaggactctgactaagtagaggagaggcgtgaacagtagggtcggcgctacagtaccgcggttactgttcacgacttccctaggcgccccatccgggccttcctgttgggccatcttctaatcttctgggccttcgttctttaacagcatgatgtagttcaattctcttgcacgggcccgagtcactggcccaggtggaaggggtggcgcctggacaggggaagatggtgcctgggctggagaaagtgctgctggtgtagatgtactcgtgttggtgttgatgtcctcatcatcctccccttcttgaactgaagtcgtcctcgatggcaactcctcatcttctcccacatacggtttcaaatctgcaacattaaaactagtggaaacaccaaactccgcaggcaggtcaaggatataagcagtagcattaatcttggttagtatcttaaaaggaccagcagcacgaggcatcaatttagaacgacgcaaagtaggaaaacgatcctttctcaaatgaaccaaaccatatcaccaggttcaaaagtaactagtttccggcctttactaccagtaatatgatatttagcattagcagcagcaatgttttgttgagtttgttcaacatgtgcaacacatctatgtgtgg

SEQ ID NO: 311 - DNA, 2182 bp, Zea mays
  source (0)...(0): Zea mays BAC clone full insert sequence contig bacb.pk243.l15.fis69
  misc_feature (1)...(2182): n = A,T,C or G
gaccacaaaatatgaaacccagctattgtttttccatcatcacaagaagaattgattgctgacacttgtgatagtgaagatntgtggtataatgattcacatgtactaaggcaacaactagtaaatgaacatgttacatctgttattgaaccaaacattttggctaaaaaggaacatgtaatttgtattgcaaacgaaactgaagaaataaatttgctctcttctttaaatacttggggctatattgagtttgatgatctttttgagctcggtaatttggaaaatattttatttgctagatcaactataccttgtccttctcatgttatattttacattgctggcaagtacaacaacataggacaatttcttgtgcgtagaatttctattttatctagatatgttgtttcttcactttgtgcaaataagatattggtatgttctcaagaagaaaagaatctcttgtttccatgtactttagtagaagtttcaggtttatatttgaaagacattgataaaagcttagtcatcaacatcaatcatgatgcaaaaccgaggacggtttgctatcaagaaggggagaatgatgagaacataaaccgcacagatacggccatgttaatggctcctgctacaaagacattgaggaacaaagaagttgattggggaccaagtaatgatatttccaacatttccaaccaagcaagcacatcatcaaatttaaagatatacttggttgaggagcacacgctagagtcgaggacgactctattacaagaaggggaggatgatgaggacatcactgccatcaatacaaccacaccagcgacccccttcaccatttaatcatggaccagtgaaacgagtccgtgcatgtaaatttaattatcaggtgaactcgttccttgttgaagctaatcattccttaaatgaggtactaataccttgtgattactttattatgctaaggtgtttgggaggtgaaccatctagaatttgagaagtcaacaaggcaataaaagctgctccacttgatgggattttgtaactgcagcaagtgcaagttgaagatgatgtgcacccgttgggtgattgcccgatctttcgatgagagggtgtggaataactcgattgggggaggagacgacgttcacggcccgactacagccttccaaagacgctgcgccttagcaaccgatacaccacctcctatggctgtcacgatcttgtggagcgtgacaccctggccactagggcactcgtcctgcaagcaatcgaagaactagcaagaacaagtagaacaagtactgaattaccagatctaaatgtaggtttaaagatcaaactacaatatggtggggttccgaagacaagaagacgggcggctgaactagcacgcgcgcttgcaagcaagtagcgagagctaaacttgatctaaacaaaacccgctgttcttggtggcggctagggggtttataaacatgggaggacgaccacaagggtattggggtcgtgctgcaaccctaggatgcgtccctaatggacctaacttgatacacgacccattgggccaaaatagggtgacgcagcaccatgggcagaaaaggcaggaaatgtctcggtaagaaaacaatgattacggcggcctcagaacagatatgactataattccggatccatatgaaagtagacttgataagctttccatgttgtgcttgaacattccaatccgagcccgcatctgaccgtggtgaccgtcacaagttggtgttcttctgcagtccgaatccagcatgttcaaatccttttccctttcggtcttctccctgattcctaagcaaaacaagagtgcacgggtctccatggtctaaatatgatggacatgaactcaagagtgtaatcacctgatggttgagttgacgagcacgagcgcgagtaatgggaccagaaattggtacttgtattggtatagatgcatcagtagtgtggatgtcttcatcagcatgttcgttgcgaaaaacaaaaaaatggttccggtggcgaaaactcatgctttctatgcaccccgacacccgttttcggaatgggtgacgtgcggcaacgaaattgcgcgaaaccacctcaaacatgagttttggacctaaagtagtggattgggcatgttcgttgcgcaaaacgaaga

SEQ ID NO: 312 - DNA, 2713 bp, Zea mays
  source (0)...(0): Zea mays BAC clone full insert sequence contig bacb.pk243.l15.fis70
gcaatttcgttgccgcacgtcacccattccgaaaacgggtgtcggggtgcatacaaaagttgagttttcgccaccggaaccatttcttcgtttttcccaacgaacatgcccaatccactactttaggtccaaaactcatgtttggtgtggtttcacgcaatttcgttgcagcacgttacccattccgaaaacgggtgtcggggtgcatacaagcacgagttttcgccaccggaaccatttcttcatttttcgcaacgaacatgcccaatccactactttaggtccaaaactcatgtttgggtggtttcgcgcaatttcgttgccgcacgtcacccattccgaatacgggtgtcggggtgcatacaaaacacgagtttttgccactggaaccatttcttcgtttttcgcaacgaacatgcccaatccactactttaggtccaaaactcatgtttggggtggtttcgcgcaatttcgttgtcatacgtcaccccattcccaaaactggtgtcggggtgcatacaaagctccaccggaaccatttcttcgtttttcgcaacgaacatgcccaatccactactttaggtccaaaactcatgtttggggtggtttcgcgcaatttcgttgtcatacgtcaccccattcccaaaacgggtgtcggggtgcatacaaagctccaccggaaccatttcttcgtttttcgcaacgaacatgcccaatccactactttaggtccaaaactcatgtttggggtggtttcgcgcaatttcgttgtcatacgtcaccccattcccaaaacgggtgtcggggtgcatacaaagcacgagtttttgccaccggaaccaattcttcgtttttcgcaacgaacttgccaaatccactgctttaggtccaatactcatgtttggggtggtttcgtgccacacgtcacccattccgaaaacgggtgtcggggtgcatacaaagcacgagtttttgccaccggaaccatttcttcgtttttcgcaacgaacatgccaatccattactttaggtccaaaactcatgtttggggtggtttcgcgcaatttcgttgccgcacgtcacccattccgaaaacgggtgttggggtgcatacaaagcacgagtttttgccaccggaactatttcttcatttttcccaacgaacatgcccaatccactactttaggtccaaaactcatgtttggtgtggtttcacacaatttcgttgccgcacgttacccattccgaaaacgggtatcggggtgcatacaagcacgagtttttgccaccggaaccattccttcgtttttcacaacgaacatacccattccactactttaggtccaaaactcatgtgttggggtggttttgcgcaatttcgttgccgcacgtcacccattccgaaaacgggtgtcggggtgcatacaaaggttgagttttcgccaccggaaccatttcttcgtttttcccaacgaacatgcccaatccactactttaggtccaaaactcatgtttggtgtggtttcacgcaatttcgttgccgcacgttacccattccgaaaacgggtgttggggtgcatacaagcacgagtttttgccaccggaaccatttcttcgtttttcacaacgaacatacccattccactactttaggtccaaaactaatgtgttggggtggttttgcgcaatttcgttgccgcacgtcacccattccgaaaacgggtgtcggggtgcatacaaagaacgagtttttgccaccggaaccatttctttgtttttcgcaacgaacatgcccaatccactactttaggtccagaactcatgtttggggtggtttcgcacaatttcgttgccgcacgtcacccattccgaaaacgggtttcggggtgcatacaaagcacgagttttcgccaccggaaccatttcttcatttttcgcaacgaacatgcccaatccactactttaggtccaaaactcatgtttggggtggtttcgcgtaatttcgttgccgcatgtcacccattccgaaaacgggtgtccgggtgcatacaaagcacgagttttttccaccggaaccattttttcgtttttcgcaacgaacatgtccaatcaactattctaggtccaaaactcatgtttggggtggtttcgcgcaatttcgttgccgcacgtcaccgattccgagaacgggtgtcggggtgcacatcagttttcgccaccggaaccatttcttcatttttcgcaacgaacatgcccaatccactactttaggtccaaaactcatgtttgggtggtttcgcgcaatttcgttgccgcacgtcacccattccgaatacgggtgtcggggtgcatacaaaacacgagtttttgccactggaaccatttcttcgtttttcgcaacgaacatgcccaatccactactttaggtccaaaactcatgtttggggtggtttcgcgcaatttcgttgtcatacgtcaccccattcccaaaactggtgtcggggtgcatacaaagctccaccggaaccatttcttcgtttttcgcaacgaacatgcccaatccactactttaggtccaaaactcatgtttggggtggtttcgcgcaatttcgttgtcatacgtcaccccattcccaaaacgggtgtcggggtgcatacaaagctccaccggaaccatttcttcgtttttcgcaacgaacatgcccaatccac

SEQ ID NO: 313 - DNA, 4626 bp, Zea mays
  source (0)...(0): Zea mays BAC clone full insert sequence contig bacb.pk243.l15.fis71
gcccgtcccccattcccgaaaacgggtgtcgggggtgcatacaaagcatgagttttttcaccggaaaccattttttcttttttcgcaacaaacatccccatccattactttaggtccaaaacacatgtttggggtggtttcgcgcaatttcgttgctgcacgtcacccattccgaaaacgggtgttggggtgcatacaaagcacgagtttttgccaccggaaccatttcttcgtttttcccaacgaacatgcccaatccacaacattaggtccaaaactcatgtttggcgtggtttcgcgcaattttgttgccgcatgttacccattccgaaaacgggtgtcggggtgcatacaagcacgagtttttgccaccggaaccatttcttcgtttttcacaacgaacatgcccattccactactttaggtccaaaagtcatgtttggggtggttttgcgcaatttcgttgccgcacgtcacccattccgaaaactggtgtcgggttgcatacaaagtttgagttttcgccaccggaaccatttcttcgtttttcgcaacgaacatgccaatccattactttaggtccaaaactcatgtttggggttggtttcgcgccacacgtcacccattccgaaaacgggtgttggggtgcatacaaagcacgagtttttgccaccggaaccatttcttcgtttttcacaacgaacatgctcattccactactttaggtccaaaagtcatgtttgggttggttttgcgcaatttcgttgccgcacgtcacccattccgaaaactggtgtcggggtaaagcttgagttttcgccaccggaaccatttcttcgtttttcgcaacgaacatgcccaatccactactttaggtccaaaactcatgtttggggtggtttcgcgcaatttcgttgccgcacgtcacccattccgaaaacgggtgtccgggtgcatacaaagcacgagttttttccaccggaaccatttcttcgtttttcgcaacaaacatacccaatccactactttaggtccaaaacacatgtttggggtggtttcgcgcaatttcgttgccgcacgtcacccattccgaaaacgggtgttggggtgcatacaaagcacgagtttttgccaacggaaccatttcttcgtttttcccaacgaacatgcccaatccacaactataggtccaaaactcatgtttggcgtggtttcgcgcaatttcgttgccgcatgttacccattccgaaaacgggtgtcggggtgcatacaagcacgagtttttgccaccggaaccatttcttcgtttttcacaacgaacatgcccattccactactttaggtccaaaactcatgtttggggtggttttgcgcaatttcgttgccgcacgtcacccattccgaaaacgggagtcgggggtgcatacaaagcatgagttttcgccaccggaaccatttcttcgtttttcgcaacgaacatgcccaatacactactttaggtccaaaactcatatttggggtggtttcacgcaatttcgttgcagcacgtcacccattccgaaaacgggtgtcgggtgcatacaaagcatgagttttcgccaccggaaccatttcttcgtttttcgcaacaaacatgcccaatccactactttaggtccaaaactcatgtttggggtggttttgtgcaatttcgttgccgcacatcaaccattccgaaaacgggagtcggtgtgcatacaaagcatgagttttcgccaccggaaccatttcttcgtttttcgcaacgaacatgcccaatccactactttgggtccaaaactcatgtttggtgcggtttcgcgtaattttgttgtcgtacgtcacccattccccaaacgtgtgtcggggtgcatacaaagcacgacttttgccaccggaaccaattcttcgtttttcgcaacgaacatgcccaatccactactttaggtccaaaacttatgtttggtgtggtttcgcactatttcgttgccgcacgtcacccattccgaaaacgggtgtcggggtgcatacaaagcacgagtttttgccaccgaaaccatttcttcgtttttcgcaacaaacatgcccaatccactactttaggtccaaaactcatgtttgggttggtttcgcgcaatttcgttgccgcacgtcacccattctgaaaacggatgtcattgtggatacaaagcacgagttttcgccaccggaaccatttcttcgtttttcgcaacgaacatgctcaatccactactataggtccaaaactcatgtttggggtggtttcgcgcaatttcgttgccgcacgtcacccattccgaaaacgggtgtcggggtgcatacaaagcacgagttttcgccaccggaaccatttcttcgtttttctcaacgaacatgcccaatccactaccttaaggcccaaaaccaaggttggggtgggtttgcgcaatttcgttgccccacgtcacccattcccaaaaccggagtccggggggcatacaaaacaagatttttcccccccagaaccattttttcttttttcccaacgaacatgcccaatcgactactttggggccaaaaatcatgtttggggtggtttcgcgcaatttcgttgccgcacgtcacccattccaaaaacggtagtcgggtgcattaaaagcatgagttttcgccaccggaaccatttcttcgtttttcgcaacgaacatgcccaatccactactttgggtccaaaactcatgtttggggtggtttcgcgcaatttcgttgccgcacgtcacccattccaaaaacgggagtcggggtgcatacaaagcacgagttttcgccaccggaaccatttcttcgtttttcgacacgaaatgcccaatccactactttgggtccaaaactcatgtttggggtggtttcgcgcaatttcgttgccgcacgttacccattccgaaaacgggtgtcgggtgcatacaaagcatgacttttcgccaccggaaccatttcttcgtttttcgcagcgaacaagtccaatccactactttaggtccaaaactcgtgtttggggtggtttcgcgcaatttcgttgccgcacgtcacccattccgaaaacgggtgtcgggtgcatacaaagcatgagtaggggcgtaaacggtacggatattatccgaccatctgaccgtccgaagaggctaattattcagttgaatagttttttcggatatccgcagaatttttggattacggattcgaattcggatagtacagttcggatatcggatacggatatgatatgactgatatccgtcggatttcggatatccggatatcttctcggataactgtccggatttcatatttcggatatccggacatctactcagatatcttaccagatttcagattttagatattcggatatccggatatcttctcggataacatgtggaatcgtcctaaatatccaagtttcaacataatcaatacttcactttatcattttcatatgtggatttgaggttatgttcttatataatgtttattgttcgtggtaacatatttgcaatttttggtcaatagtggaatattttatgaatttaaatgtattttgataattttctgtagaaaaaattataataatacacaaatagtctcaaaaaatcatgaaatttgacggaggagcaatatatgcccatatagcatcctaaaaaatgtttgagccataaaatctaaagattgccaacatttctttcaattcactttcacttgttacctgagttacatgtgatatcaccttaactatccaaattttaacataatcaatacttcactttatcattttcacatagggacttcatattatctttaatagaatgtttattggtcctggtaacttatttagaatttttggtagacactagattattttatgattttaattacattttgatgattttttgtagaaagaaattaataatacacaaattgccttagaaattcataaaatttgacggagggttaacatttgtctacataaaattctaaaaaatgtttgtgccataaagtccataagatgccagtgattcttttcattttcttacacttgttgtgtgagttacacgtgaaatcagctgaagtatctaagtgtcggcgtttcgagaccggggggggggggggtccctaagccgacgagtgaatgtcgccgcgtgccctagcccagatgggtcgacgcgaggccgagcgcgaaagggggaagtgaggtggccggagaccggcgtgagagaggtggaaatcccgcggccttcgtgttcgtcccgcgcccaggtcgggtgcgcttgcagtagggggttacaagcgtccacgcgggagagggagcgagcggcctcacgcgagcgcctgtctcgtcctcgtccccgcgcggccaaccctgatgtgcacccgttgggtgattgcccgatctttcgatgagagggtgtggaataactcgattgggggaggagacgacgttcacggcccgactacagccttccaaagacgctgtgccttagcaaccgatacaccacctcctatggctgtcacgatcttgtggagcgtgacaccctggccactagggcactc

SEQ ID NO: 314 - DNA, 2513 bp, Zea mays
  source (0)...(0): Zea mays BAC clone full insert sequence contig bacb.pk243.l15.fis72
ttattcgcttgatgtgcgaggctcaaaagggtgctgggataaggtctaacctaaatttttatgtggttttatggactgtaggagaaaaaaactcgagataaactcaccgatcaacctggaaatctgataccacttgatagagctggagtgcccgatctttcggtgagtggagataattccgatttggtggaagtagaacctcacgatccgactacgacgagcgaacccgaagcgccaatgcaatcgctgaaccaactcccaatggttaccgaccttgctgatgcgagatcggcctgatcacgaagatcatttcctgtgcgcaatcgaagaacgaacaagaaaaagatgcgagcaatcttaatatcactcgaggtggagttttgaatcacagaggacaacacgtatttgtgcgtgttctagggcagctaaagctagatgtaaaacaaaactcaagttctaaataaaacaggactctgactaaatagaggagaggcgtgaacagtagggccggcgctacagtaccgcggttactgttcacgccttccctaggcaccccatccgggccttcctgttgggccatcttctaatcttctgggccttcgttctttaacagcatgatgtagttcaattctcttgcacgggcccgagtcactggcccaggtggaaggggtggcgcctggactagggaagatggtgcctgggctggagaaggtgctgctggtgtagatgtacttgtgttggtgttgatgtcctcatcacgtcacccattctgaaaacgggtgtcggtgtgcatacaaagcatgagttttcgccaccggaaccatttctttgtttttcgcaacgaacatgcccaatccactgcttttggtccaaaactcatgtttgaggtggtttcactcaatttcgtagcctcacgtcacccattccgaaaacgggtgtcagggtgcacataaagcacgagttctttccacctgaaccatttcttcgttattcgcaacgttcgtgcccaatccactactttaggtccaaaactcatgtttggggtggtttcgcgcaatttcgttgtcgcacgtcacccattccgaaaacgggtgtcggggtgcatataaagcatgagtttttgccaccggaactatttctttgtttttcgcaacgaacatgctcaatccactactttaggtccaaaactcatgtttggtgtggtttcgcgcaatttcgttgtcgtacgtgacccattcccaaaacgggtgtcggggtgcatacaaagcacgacttttgccaccggaaccaattcttcgtttttcgcaacgaacatgcccaatccactactttatgtccaaaactcatgtttggtgtggtttcgcgctatttcattgccgcacgtcacccattccgaaaacgggtgtcgtggtgcatacaaagcacgagtttttgccaccggaaccatttcttcgtttttcgcaacgaacatgcccaatccactactttaggtccacaactcatgtttgggttggtttcgcgcaatttcattgccacacgtcacccattctgaaaacgggtgtcgggtgcattcaaagcatgagttttcgccaccggaaccatttcttcgtttttcgcaatgaacatgcccaatccactactttaggtccaaaactcatgtttggggtggttttgtgcaatttcgttgccgcacattaccaattccaaaaatgggtgtcagggtgcatacaagcacgagtttttgccaccggaaccatttcttcgttttgcgcagcgaacatgctcaatccaatactttaggtccaaaactcatgtttggggtggtttcacgcaatttcattgccgcacgtcacccattacaaaaacgggtgtcgggcggggtgcatacaaagcacgagtttttgccaccggaaccaattcttcatttttcgcacgaacatgcccaatccaccaatttaggtccaaaactcatgtttggggtggtttcgcgctatatcgttgccgcacatcacccattccgaaaacgggtgtcggggtgcacacttagcacgtgtttttgccaccggaaccatttctttgtttttcgcaacgaacatgcccaatccaccactttagatccaaaactcatgtttggggtggtttcgcgcaattttgttgccgcatgtcacccattccgaaacgggtgttggggtgcatacaaagcacgagttttcgccaccgaaaccatttcttcgtttttctcaatgaacatgcccaatccactactttaggtccaaaactcatgttggggttggttttgcgcaatttcgttgccgcacgtcacccattctgaaaacaggtgtcggtgtgcatacaaagcatgagttttcgccaccggaaccatttcttcgtttttcgcaacgaaaatgcccaatccactgctttagatccaaaactcatgtttggggtggtttcgcgcaatttcgttgcctcacgtcacccattccgaaaacgggtgtcggggtgcacataaa

SEQ ID NO: 315 - DNA, 2716 bp, Zea mays
  source (0)...(0): Zea mays BAC clone full insert sequence contig bacb.pk243.l15.fis73
gaccaaatcgcaggagcatttaatgcaaaggtggcctgacacctttatcctgatgcgcgccccccagccgacagagccgaagtgaccaccatcactttgccgctccactgaccggcctgacagaaagacagcgccgcctgcactgctccgactgcggtgccacttgacagagtgaggctgacaggcagtcagacccggccgcaggcaccataggaagctccgcttcacccgacccagggctcggactcgagctaagccccggaagacgacgaactccgctccgcccgacccagggctcggactcgggctaagccccggaagacggcgaactccgctccgcccgacccagggctcggacacgggctaagccccgaaagatggcgaactccgctccgcccgacccagggctcggactcgggctaagccccagaagacggcgaactccactccgcccgacccagggctcggactcgggctaagcctcggaagacggcgaactccgctccgcccgacccagggctcggactcgggctcagccccagaagacgacgaactccgcttcgcccgatcccagggctcggactcgggcacagccccagaagacgacgaactccgcttcgcccgaccctagggctcggactcgggctcagcccccagaagatgacgaactccgcttcgcccgaccccaaggcccggactcagccctggcctcagccgacggtctccgcctcgcccgaccaagggctcggactcgacctcggccacggaaggcagactcgacctcggcttcggaggagcttccacatcgcccaacctagggcgcagaccggccacgtcaacaggaggcaccatcatcgccctaccccgagttgactcgggccacgggaaacaagaccggcgtcccatctggctcgctccaccagataggcaatgatggcgccccgcacactcggtgacgacggcggctctcagcccccttacggaagcaaaaggacgtcagcagggactcaacagctccgacagctgtccctccgccaggctccagcactcctccgacggccacgacatcacaccagctgggtgccaaaatctctccggctgccacgacggcatgtactcagggcgctagctctcctccgctagacgcgtagcactctgctacaccccccattgtacacctggatcctctccttacgcctataaaaggaaggactagggccctcttagagagggtttgatgaagacatccacactactgatacatctatgccaatacaagtaccaatttctggtcccattacttctggtcccattactcgcgctcgtgctcgtcaactcaaccatcaggtgattacactcttgaatgcatgtccatcatatttagaccatggagacccgtgcactcttgttttgcttaggaaccagggagaagaccgaaagggaaaatgatttgaacatgctggattcggactgcagaaaaacatcaacttgtgacggtcaccacggtcacatgcgggctcggattggaatgttcaagcacaacatggaaagcctatcaagtctactttcatatggatccggaattatagtcatatctgttctgaggccgccataatcattgtttccttaccgagacatttcctgccttttctgcccatggtgctgcgtgaccctattttggcccaatgggtcgtgtatcaagttgggtccattagtgacgcatcctagggttgcagcacgaccccaatacccttgtggtcgtcctcccatgtttataaaccccctagccgccaccaagaacagcgggtttttttagatcaagtttagctctcgctacttgcttgtaagcgcgcgtgctggttcagccgcccgtcttcttgtcttcggaaccccaccatattggagtttgattttgaaacctacatttagatctggtaattcagtacttgttctacttgttcttgctagttcttcgatttcttgcaggacgagtgccctagtggctagggtgtcacgctccacaagatcgtgacagccataggaggtggtgtatcggttgctaaggcgcagcgtctttggaaggctgtagtcgggccgtgaacgtcgtctcctcccccaatcgagttattccacaccctctcatcgaaagatcgggcaatcacccaacgggtgcacatcagttggtaatcagagcaaggtttatcggtgagagatttacttttcttcgctgttttcttatctcctatagtccagaaaaagccaaaaaaatagtagtttagttttaccgcaatcctataaaccattgaccatttactagtactacttagctagggcttgttgagtttttggttgcatcggttgtgtcgagttgctggtcttagtttatttttttagagttttgagttctaccacgttttggtcaccacgagatccaccatcaccataaacttcgtttttgccaccacggatacatctcatgtccgatttggaagtttaaatacaatctggaaagcttatcttatcttatttccaacggatctgaccttgtctcaaaattcattctgagcgctccgcaatcatcgtagagatttctggactttctatattaacaagatttgttaaatctgatttaaagcggctgttagcaatatccttattgtttgggttgtcatagtgaaaaaaagggtttaggcccctgcaaaaaaaagaagaagaa

SEQ ID NO: 316 - DNA, 3633 bp, Zea mays
  source (0)...(0): Zea mays BAC clone full insert sequence contig bacb.pk243.l15.fis74
gaaattgcacgaaaccaccccaaacatgagtcttggacctaaagtagtggattgggcatgttcgttgcgaaaagcgaagaaatggttctggtggcgaaaactcatgctttgtatgcaccccgacacccgttttcggaatggttgacgtgcggcaacaaaattgcgcgaaaccaccccaaacatgagttttggacctaaagtagtggattgggcatgttcgttgcgcaaaacgaagaaatggttccggtggcaaaaactcgtgcttgtatgcaccctgacacccttttttggaattggtgacgtgcggcaacgaaattgcacgaaaccaccccaatcatgagttttggacctaaatagtggattgggcatgttcgttgcgaaaaacgaagaaatggttccggtggcgaaactcgtgctttgtatgcacccggacacccgttttcggaatgggtgacgtgcggcaacgaaattgcgcgaaaccaccccaaacacgagttttggacctaaagtagtggattggacttgttcgctgcgaaaaacgaagaaatggttccggtggcgaaaagtcatgctttgtatgcacccgacacccgttttcggaatgggtaacgtgcggcaacgaaattgcgcgaaaccaccccaaacatgagttttggacctaaagtagtgtattgggcatgttcgttgagaaaaacgaagaaatggttccagtggcgaaaactcgtgctttgtatgcaccccgacaccggttttcggaatgggtgacgtgcggcaacgaaattgcgcgaaaccaccccaaacatgagttttggacccaaagtagtggattgggcatgttcgttgcgaaaaacgaagaaatggttccggtggcgaaaactcatgctttgtatgcacccccgactcccgttttcggaatgggtgacgtgcggcaacgaaattgcgcaaaaccaccccaaacatgagttttggacctaaagtagtggattgggcatgttcgttgagaaaaacgaagaaatggttccggtggcgaaaactcatgctttctatgcaccccgacacccgttttcggaatgggtgacgtgcggcaacgaaattgcgcgaaaccacctcaaacatgagttttggacctaaagtagtggattgggcatgttcgttgcgaaaaacaaagaaatggttccggtggcgaaaactcgtgctttgtatccaccctgatacccctttttggaattgggtgacgtgcggcaacaaaattgcgcgaaaccaccccaaacatgagttttggacctaaagtagtggattggacttgttcgctgcgaaaaacgaagaaatggttccggtggcgaaaagtcatgctttgtatgcacccgacacccgttttcggaatgggtaacgtgcggcaacgaaattgcgcgaaaccaccccaaacatgagttttggacctaaagtagtggattgggcatgttcgttgagaaaaacgaagaaatggttccaatggcgaaaactcgtgctttgtatacaccccgacaccagctttcggaatgggtgacgtgcggcaacgaaattgcgcgaaaccaccccaaacataagttttggacctaaagtagtggattgggcatgttcgttgcgaaaaacgaagaaatggtttcggtggcaaaaactcgtgctttgtatgcaccccgacacccgttttcggaatgggtgacgtgcggcaacgaaatagtgcgaaaccacaccaaacatgagttttggacctaaagtagtggattgggcatgttcgttgcgaaaaacgaagaaatggtttcggtggcgaaaactcatgctttgtatgcatccgacacccgttttcggaattggtgacgtgcggcaacgaaattgcgcgaaaccaccccaaacatgagttttggacctaaagtagtggattgggcatgttcgttgcgaaaaacgaagaaatggttccgggtgcgaaaactcttgctttgtatgcaccccgacacccgttttcggaatgggtaacgtgcggcaacgaaattgcgcgaaaccaccccaaacatgagttttggacctaaagtagtggattgggcatgttcgttgagaaaaacgaagaaatggttccggtggcgaaaactcgtgctgtgtatgcaccccaacacccgttttcggaatgggtaacgtgcggcaacgaaattgcgcgaaaccaccccaaacatgatttttggacctaaagtagtggattgggcatgttcgttgcgaaaaacgaagaaatggttccggtggcaaaaactcgtgctttgtatgcaccccgacacccgttttcggaatgggtaacgtgcggcaacaaaattacgtgaaaccacctcaaacatgagttttggtcctaaaatagtggattgggcatgttcgttgagaaaaacgaagaaatggttccggtggcgaaaactcatgctgtgtatgcaccccgacacccgttttcggaatgggtgacgtgcggcaacgaaattgcgcgaaaccaccccaaacatgatttttggacctaaagtagtggattgggcatgttcgttgcgaaaaacgaagaaatggttccggtggcaaaaactcgtgctttgtatgcaccccgacacccgttttcagaatgggtgacgggcggcaacgatattgcgcgaaagcaccccaaacatgagttttggacctaaagtagtgtattgagcatgttcgttgagaaaaacgaagaaatggttccagtggcgaaaactcgtgctttgtatgcaccccgacaccggttttcggaatgggtgacgtgcggcaacgaaattgcgcgaaaccaccccaaacatgagttttggacccaaagtagtggattgggcatgttcgttgcgaaaaacgaagaaatggttccggtggcgaaaactcatgcttttaatgcacccgactaccgttttcggaatgggtgacgtgcggcaacgaaattgcgcgaaaccaccccaaacatgatttttggacctaaagtagtcgattgggcatgttcgttgcgaaaaatgaagaaatggtttcggtggcgaaaactcatgctttgtatgcatccgacacccgttttcggaatgggtgacgtgcggcaacgaaattgcgcgaaaccaccccaaacatgagttttggacctaaagtagtggattgagcatgttcgttgagaaaaacgaagaaatggttccggtggcgaaaactcgtgctttgtatccaccttgacacccattttcggaatgggtgatgtgcggcaacgaaattgtgtgaaaccaacccaaacatgagttgtggacctaaagtagtggattgggcatgttcattgcgaaaaacgaagaaatggttccggtggcaaaaactcgtgctttgtatgcaccccgacaccctttttcggaatgggtgacgtgcggcgacaaaatagcgcgaaaccacaccaaacatgagttttggacataaagtagtggattaggcatgttcgtagcgaaaaatgaagaattggttccggtggcaaaagtcgtgctttgtatgcaccccgacacccgttttggaaatgggtgacgtacgacaacgaaattgcgcgaaaccacaccaaacatgagttttggacctaaagtagtggat

SEQ ID NO: 317 - DNA, 3812 bp, Zea mays
  source (0)...(0): Zea mays BAC clone full insert sequence contig bacb.pk243.l15.fis75
gtgcggcaacgaaattgcgcgaaaccaccccaaacatgagttttggacctaaagtaatggattggcatgttcgttgcgaaaaacgaagaaatggttccggtggcaaaaactcgtgctttgtatgcaccccgacacccgttttcggaatgggtgacgtgtggcacgaaaccaccccaaacatgactattggacctaaagcagtggatttgccaagttcgttgcgaaaaacgaagaattggttccggtggcaaaaactcgtgctttgtatgcaccccgacacccgttttgggaatggggtgacgtatgacaacgaaattgcgcgaaaccaccccaaacatgagttttggacctaaagtagtggattgggcatgttcgttgcgaaaaacgaagaattggttccggtggcaaaagtcgtgctttgtatgcacctcgacaccccgttttgggaatgggtgacgtacgacaacgaaattgcgcgaaaccacaccaaatatgagttttggacccaaagtagtggattgggcatgttcgttgtgaaaaacgaagaaatggttccggtggcgaaaactcatgctttgtatgcacccccactaccgttttcggaatgggtgacgtgcggcaacgaaattgcgcgaaaccaccccaaacatgagttttggacctaaagtagtggattgggcatgtttgttgcgaaaaacgaagaaatggttccggtggcgaaaactcatgatttgtatgcacccgacacccgttttcggaatgggtgacgtgcggcatcgaaattgcgcgaaaccaccccaaacatgagttttggacctaaagtagtggattaggcttgttcgctgcgaaaaacgaagaaatggttccggtggcgaaaactcatgctttgtatgcacccgacacccgttttcggaatgggtaacgtgcggcaacgaaattgcgcgaaaccaccccaaacatgagttttggacctaaagtagtggattgggcatgttcgttgagaaaaacgaagaaatggttctagtggcgaaaactcgtgctttgtatgcaccccgacaccggctttcggaatgggtgacgtgcggcaacgaaattgcgcgaaaccaccccaaacatgaattttggacccaaagttgtggattgggcatgttcgttgcgaaaaacgaagaaatggttctagtggcgaaaactcatgcttttaatgcacccccgacaccgttttcggaatgggtgacgtgcggcaacgaaattgcgcgaaacccacccccaaacatgagttttggacctaaagtagtcgattgggaatgttcattgcgaaaaacgaagcaatggttccggtggcgaaaactcatgctttgcatgcatccgacacccgttttcggaatgggtgacgtgcggcaacgaaatcgcgcgaaaccaccccaaacatgagttttggacctaaagtagtggattgggcatgttcgttgagaaaaacgaagaaatggttctggtggcgaaaactcgtgctttgtatgcaccccgacaccggctttcggaatgggtgacgtgcggcaacgaaattgcgtgaaaccaccccaaacatgagttttggacccaaagttgtggattgggcatgttcgttgcgaaaaacgaagaaatggttctggtggcgaaaactcatgcttttaatgcaccccgactaccgttttcggaatgggtgacgtgcggcaacgaaattgcgcgaaaccaccccaaacatgatttttggacctaaagtagtcgattgggaatgttcattgcgaaaaacgaagcaatggttccggtggcgaaaactcatgctttgcatgcatccgacacccgttttcggaattggtgacgtgcggcaacgaaattgcgcgaaaccaccccaaacatgagttttggacctaaagtagtggattgggcatgtttgttgcgaaaaacgaagaaacggttccggtagcaaaaactcgtgcttgtatgcaccccgacacccgttttcggaatgggtaacgtgcggcaacgaaattgcgcgaaaccacccccaaacatgagtttttgacctaaataatggaatgggcatgttcgttgagaaaaatgaaaaaatgggtcccgtgggaaaaactcgtgcttgtatgcaccccgacaccccctttcggaatgggtaacatgcggcaacgaaatagcgtgaaaccagcccaaacatgagttttggacctaaagtagtggattgggcatgctcgttgtgaaaaacgaagaaatagttccggtggcgaaaactcgttctttgtatgcaccccgacacccgttttcggaatgggtgacgtgcggcaacgaaataacgcgaaaccacaccaaacatgagttttggacccaaagtagtggattgggcatgttcgttgcgaaaacgaagaaatggttccggtggcgaaaactcatgctttgtatgcacccgacacccgttttcggaatgggtgacgtgcggcaataaaattgcgcgaaaccaccccaaacatgagttttggacctaaagtagtggattgggcatgttcattgcgaaaaacgaagaaatggttccggtggcgaaaactcgtgctttgtatccaccctgacacccgttttcggaatgggttccgtgcggcaacgaaattgcgcgaaaccaccccaaacatgagttttggacctaaagtagtggattgggcatgttcgttgcaaaaacgaagaaatggttccggtggcaaaaactcgtgctttgtatgcaccccgacccccgttttcggaatgggtgacgtgcggcaacgaaatagcgcggaaccaccccaaacatgagttttggacctaaagaagtggattgggcatgtttgttgcaaaaaaacgaagaattggttccggtggcaaaagtcgtgctttgtatgcacctcgacacccgttttgggaatgggtgacgtacgacaacgaaattgcgcgaaaacacaccaaatatgagttttggacccaaagtagtggattgggcatgttcgttgtgaaaaacgaagaaatggttccggtggcgaaaactcatgctttgtatgcacccccactaccgttttcggaatgggtgacgtgcggcaacgaaattgcgcgaaaccaccccaaacatgagttttggacataaagtagtggattgggcatgtttgttgcgaaaaacgaagaaatggttccggtggcgaaaactcatgatttgtatgcacccgacacccgttttcggaatgggtgacgtgcggcatcgaaattgcgcgaaaccaccccaaacatgagttttggacctaaagtagtggattaggcttgttcgctgcgaaaaacgaagaaatggttccggtggcgaaaactcatgctttgtatgcacccgacacccgttttcggaatgggtaacgtgcggcaacgaaattgcgcgaaaccaccccaaacatgagttttggacctaaagtagtggattgggcatgttcgttgagaaaaacgaagaaatggttctggtggcgaaaactcgtgctttgtatgcaccccgacaccggctttcggaatgggtgacgtgcggcaacgaaattgcgcgaaaccaccccaaacatgagttttggacccaaagttgtggattgggcatgttcgttgcgaaaaacgaagaaatggttctggtggcgaaaactcatgcttttaatgcaccccgactaccgttttcggaatgggtgacgtgcggcaacgaaattgcgcgaaaccaccccaaacacgagtttttggacctaaagtagtcgattgggaatgttcattgcgaaaaacga

SEQ ID NO: 318 - DNA, 4016 bp, Zea mays
  source (0)...(0): Zea mays BAC clone full insert sequence contig bacb.pk243.l15.fis76
tcttatccgttcttaccaagccacagtggtgaactgcaaccaacaggtggaaccggtgaaagattggatgagcgattgcctggagaaacagaaaccttctcgtcgtagaaatatgtggagttttgggtaggctgcactcaactcaaggattagcacaatcaaaaaataatgcaaagttgaattatagtgcaaaacacgaaactatattactggccacaagtgcaaaggacggatggaactagcagaatggcagtaccgtaactattgtactagcgaggccaaaaaggcactagtatgaatcacaggtgattttgtttttcttttttgtatgatttttttaatatttttctcagcacaaggagcaacaaaataggagctacacgaagtttcacctaaaaaagagttcagatgtggtctacagaaaattaggaagttctccgaaaagcgtgcgagatctttgacgatttttttctttattttcctgaattttttgacaattttatcgaaaccaaacaggccgtaggcgagtttggccggcctcagaatggtgtcaacaagcttctgtaaaaatttcagattttttgaacaaccgagtgaaaagttatgcccggtttaaggaaggtatgtaaaaatcaggaagttgtatcctttctccttcgttttttttgtttctgtttttttacgtaaccgaaggagaaaaacaaggaagcggcgttgactcggtttgtttttttctgttttttttacgtaaccgaaggagaaaaataaggaagcggcgttgactcggtttgtggcgtgatcaaacggaatatggtggcggcgcgctagggtttgaatggtggaataacacaatgcaaccagcaacaaatgacgtgaaagcacacaaattcaacaatgcagattattgaaagaaagtgagaggctcaaaagggttctgggataaggtctaacctaaatttttatgtggttttatggactgtaggagaaaaaaactcgagataaactcaccgatcaacctggaaatctgataccacttgatagagctggagtgcccgatctttcggtgagtggagataattccgatttggtggaagtagaacctcacgatccgactacgacgagcgaacccgaagcgccaatgcaatcgctgaacaaactcccaatggttaccgaccttgctgatgcgagatcggcctgatcacgaagatcatttcctgtgcgcaatcgaagaacgaacaagaaaaagatgcgagcaatcttaatatcactcgaggtggagttctgaatcacagaggacaacacgtatttgtgcgtgttctagggcagctaaagctagatgtaaaacaaaactcaagttctaaataaaacaggactctgactaaatagaggagaggcgtgaacagtagggccggcgctacagtaccgcggttactgttcacgccttccctaggcaccccatccgggccttcctgttgggccatcttctaatcttctgggccttcgttctttaacagcatgatgtagttcaattctcttgcacgggcccgagtcactggcccaggtggaaggggtggcgcctggactagggaagatggtgcctgggctggagaaggtgctgctggtgtagatgtactcgtgttggtgttgatgtcctcatcacgtcacccattctgaaaacgggtgtcggtgtgcatacaaagcatgagttttcgccaccgtaaccatttctttgtttttcgcaacgaacatgcccaatccactgcttttggtccaaaactcatgtttgaggtggtttcactcaatttcgtagcctcacgtcacccattccgaaaacgggtgtcagggtgcacataaagcacgagttctttccacctgaaccatttcttcgttattcgcaacgttcatgcccaatccactactttaggtccaaaactcatgtttggggtggtttcgcgcaatttcgttgccgcacgtcacccattccgaaaacgggtgtcggggtgcatataaagcatgagtttttgccaccggaactatttctttgtttttcgcaacgaacatgcccaatccactactttaggtccaaaactcatgtttggtgtggtttcgcgcaatttcgttgtcgtacgtgacccattcccaaaacgggtgtcggggtgcatacaaagcacgacttttgccaccggaaccaattcttcgtttttcgcaacgaacatgcccaatccactactttatgtccaaaactcatgtttggtgtggtttcgcgctatttcattgccgcacgtcacccattccgaaaacgggtgtcgtggtgcatacaaagcacgagtttttgccaccggaaccatttcttcgtttttcgcaacgaacatgcccaatccactgctttaggtccacaactcatgtttgggttggtttcgcgcaatttcgttgccacacgtcacccattctgaaaacgggtgtcgggtgcattcaaagcatgagttttcgccaccggaaccatttcttcgtttttcgcaatgaacatgcccaatccactactttaggtccaaaactcatgtttggggtgattttgtgcaatttcgttgccgcacattaccaattccaaaaacgggtgttggggtgcatacaagcacgagtttttgccaccggaaccatttcttcgttttgcgcaacgaacatgcccaatccactaatttaggtccaaaactcatgtttggggtggtttcgcgctatatcgttgccgcacgtcacctattccgaaaacgggtgtcgggcggggtgcatacaaagcatgagtttttgccacctgaaccaattcttcgtttttcgcaatgaacatgcccaatccactaatttaggtccaaaactcatgtttggggtggtttcgcgctatatcgttgccgcacgtcacccattccgaaaatgggtgtcggggtgcatacttagcacgagtttttgccaccggaaccatttctttgtttttcgcaacaaacatgcccaatccactactttaggtccaaatctcatgtttggggtggtttcgcgcaatttcgttgcagcacgtcacccattccgaaaacgggtgttggggtgcatacaaagcacgagttttcgccaccgaaaccatttcttcgtttttctcaatgaacatgcccaatccattactttaggtccaaaactcatgtttgggttggttttgcgcaatttcgttgccgcacgccacccattctgaaaacgggtgtcggtgtgcatacaaagcatgagttttcgccactggaaccatttcttcgtttttcgcaacgaacatgcccaatccactgctttaggtccaaaactcatgtttggggtggtttcgcgcaatttcgttgcctcacgtcacccattccgaaaacgggtgtcggggtgcacataaagcacgagttctttccaccagaaccatttcttcgtttttctcaacgaacatgcccaatccactactttaggtccaaaactcatgtttggggtggtttcgcgcaatttcgttgcggcacgtcacctattccaaaaaacgggtgtcgaggtgcacacaaagcatgacttttcgccactggaaccatttcttcatttttcgcaacgaacattcctaatccactactttagatccaaaactcatgtttggcgtggtttcgcgcaatttcgttgccgcacgtcacccattcccaaaacgggtgtctgggtgaatacaaagcacaacttttgccaccggaacccattcttcgtttttcgcaacgaacatgcccaatccactactttatgtccaaaactcatgtttgatgtggtttcgctctatttcgttgccgctcgtcacccattccgaaaacgggtgtccgggtgcatacaaagcacgagtttcgccaccggaaccatttcttcgtttttcgcaacgaacatgctcaatccactatttaggtccaaaactcatgattggggtggtttcgtgcaatttcgttgccgcacgtcaccaattccaaaaa

SEQ ID NO: 319 - DNA, 3382 bp, Zea mays
  source (0)...(0): Zea mays BAC clone full insert sequence contig bacb.pk243.l15.fis77
atctaaacgtggaatagggtgtcgataacgtatcgtgatattattaatagccctacaatcaacacacatacgccatgttccatcttttttaggcactaaaataaccggaacagcacacggactaagagactcacgcacgtaacctttgtcgagtagttcttgcacttgtcgctgaatttcttttgtttcctctggatttgtcctatatggcgcacgattcggcaaagatgcaccaggaataagatcaatttggtgctcaatccctcgtataggtggcagcccctctggtatctcacttggaaatacatcagaatactcctgcaaaatgttagtaataacaggaggcaaagaatgctgcatatcttgaattgaaatcaaagcatccttgcataccaaggcgtaggcaacagtagtggaagcaaataattcattaacatcagtttttgttgcaagcaagcaatgtcctttcaattttatcccatctttgttattaccaacaactttaatattcttgttgttctcagttttagctttggtagctttagcaacatcatcacgcacaatagcctcaggggacatgggaagcaaaataattttcttatcatggtgtatgagagaatattgatttgatctaccatgatgcatacaatctgaatcaaattgccatggtctacctagcagaatattacaagcatccataggcacaacatcacagtcaacaacatcacgatatgaaccaatagcaaaattaattcgtaccaacttggttaccttgaccttaccactattgttgagccattgaatgtgatatggatgtgggtgcggtttggtcgtaagtgcaagcttctccaccatgtcgctgctagccaagttgttgcagctacctccatcaatgatcaaacgacatgaacgctccttaatgacacactttgtttgaaacaatgtatgtcgctgattctgctctgccttctccatttgtgcactaagcacacgctgtacaatgaggctctcataatgctctgcatcatctgcaccaatctgttcttcgggtggttccttagtgcctgcatcatcagccgcaagcaaagcaagtgtagcttcatccaaatcactagcagaagaatacccaccatcgtcttttaccaccaaaacacgctgattaggacaatcacgctgcacgtgtccatagcccttgcatcgataacacagaacatctcttgttctacccgtggaggctactgaagaggcactacctgctggtttctgggcagatttggttgctgaatttgtggaagatgcacgtggtttgtcgccggaggaaggcgggggtgctggtcgacttggcgagggagttggtgctagtgtacgaccggtcatggacgtagtcgtgcgctgttgccatggtgtagattttcctgcagaaacattagaccttgcactagcacgtcgtccctgcacttccctttcagctttgcaagcaagatgaaacaatcgggttacattagcataatctttataagcaaggatgtcctgaatttccctatttaacccgcccaaaaatctagccatagcagattcctcaccctcctctatgttacaacgcagcattcccatttgtaattcctgataatattcttctacacttttagtaccctgtctcaattgttgcaacttgtttaacatatcacgtgcataataagaaggaacaaatctagcccgcatgacccgtttcaacgcatcccaagtttgtggcatgttattaggattcttcttaccatgttctatccaccaaacagaagcaaattcagtaaactcactagtagcagctctaacccgcgcattctcaggaaattcatggcatgcaaacttttgatcaaccgcaatctcccaagtaatgtaagcatcagggtcatatttaccatcaaaaggaggtattttaaatttaaccttactaaaagcatcatcattaccatgtacctcacgtcggcgaaaaccacccatacctctacggttagtacgtagtcgccggcgattaggtgcttcttggtcatcttgttcagtatcagcaacatagtcatcccagttaccttcggcgccctcatcacgcccaccattgatattagcatgcatctcatcaaaccgcctcaagagtgcgacaaggctcttgtcaatatgagcaactgtcatttccacatttgcaagtttggtgttcgtgtcgatctgtgtggcctccaattgccccatcttttcattcgtcacctgcatgtcattatcaagaccttccgtgtgcgtcttcactagccttacaaagtgttgtatgatacccttggtgcgaggagagtgtggcatattacgagaagcatcatcaacctccaatcctgccatggttagacgaacagaggcaacaagaaaaaaaaacgtgaaggaataaaaactctacaactattaggatgtagctactgcaaggcgctcactctcaacctgccacacaagctcttaccaattcttaccttgcacaacaggaggggtcagcaaccaacaagtctgcaaccgtggaataagtgtatcggtgccgcagcaacacgacctgtcaaactgtagtcgaaatatgtagagttgtaggtgggctgaagcaaggaatacactagtaccacgttagttacaaaagcaagctgaataatcgttcaacggtggtactgtgctggtcctaggctaaaccaggctagagacgtgagcctaggcacaaaggtagtcactgaaaaagaacaactagcacagcacaaagagaaacaacagatttagagattcagcccccttcttcttcttttcctttttttttcttttctattctttttttttcttcttcttctgttttttttttgcaggggcctaaaccctttttttttcactatgacaacccaaacaataaagatattgctaacaacccctttaaatcagatttaacaaatcttgttaatataggaagtccagaaatctctacgatgattgcggagcgctcagaacgaattttgagataaggtcagatccgttggaaagaagataagataagctttccagattgtatttaaacttccaaatcggatatgatatgtatccgtggtggcaaaaacgaaccagagatgtttttggtggtggtggatttcgtggtgaccaaaatgtggtagaactcaaaactctaaaggaataaactaagaccagcaactcgacacaaccgatgcaaccaaaaactcaacaagccctaactaagtagtactagttaatgctcaatggtttataggattgcggtaaaactaatctactattttttggctttttctggactataggagataagaaaacagcgaagaaaagtaatctctca

SEQ ID NO: 320 - DNA, 3894 bp, Zea mays
  source (0)...(0): Zea mays BAC clone full insert sequence contig bacb.pk243.l15.fis78
  misc_feature (1)...(3894): n = A,T,C or G
caaactgccttttgttttgttgcacttacaaattttatctaccaaaatttagaactggtttctctctctctctctctctctcttgttgcacgtgtcttttttttgttttactgattagtgcggcttttttatgcactcgccttttgctttctcttctttttggttgaattgcagcaagaggtctaaagtggtgattgaaacaaggtggcgcgaactccaaactctagcggtaagaaaactttagaccagcaactcgacccaaatgcagcaattgtgaattcaacaagtcgaaaactaagtagtaaagcaaaggctcaaactgtttttaggtgaatttctgatctaaatatatatttgggcaaaagtggactgtaggtaaataaaacaaggaagattgagttctctcaccgagcaacctgaaatttgataccacttgataaacccaacgggtagaagggtgcccgatctttcgatgagaggtgatggaggtggaaaacttgttggagaacgacgttggctgcccgactaccacaaccaagatggtgtggcgccttgagcgacaggtacaccgtctcctgataactacgatttggggtggaggtcgacgttgtgctatccgactacaacaaccacaagggtgctgcaccttagcgatagttacaccagctcctattgttgccgctcttgccgtgccaagaacagccttgaacctgcaagcaatcgagaacaagcaagaacaagataaaaagcagacgctcacggatctgatagagttggggttctgtttcaagtatccgggtggtctagccgacacacatgtttacaaggaagtagcaaaggcgtttttacatcaaacaaaaaccccagttctttggtggctgctagttgcttaaatagaggaatagaaaggagttctaatggagaacaaaactctctcggcagtttctagacgcctcgtttggtttctgtcattgattcttgatgcacctgaaagtagacgaagagagctttccaacaattgcttatttgctttaaacaaccttgggagttgaaagatatgctccatttaatttagtgcttgcagttacgaaatcacttgtgctggtggagtcatgaagttgtctcggccgttcctggacgccttggatgcgttctctccttgactcttgatctactagaaagtagacaaagagacctttccaacaagtgcttatttgcattaaacaaccttgggagctgaaagatatgccctcttaaacttgcacttgttgtagtttcgaaatcccctcaagtggagcagcttttattgccttgttgccttctcaaattctagatggttcacctcccaaacaccttagcataataaagtaatcataaggtattagtacctcatttaaggaatgattagcttcaacaacaaggaacgagttcacctgataattaaatttacgtgcacggactcatttcactggtccatgattaaatggtgaagggggtcgctggtgtggtgtattgatggcagtgatgttctcatcactgataggtatgaaagtcttgttgtgcagcgtgttcttagtacacaggtcgctttgcccgagaagaatcagcgacacactctattccatacaaagggtgttgtgcaggagcggtcaattcacatcattatcgacagcggcagttgcaacaatttggcgagtaccattctggtcgaaaagttgtcgttacccactcgtaagcatccaaacccatatcacattcaatggcttaatgatggtggtaaaataaaaatcacacgttccgtacgtgttcctttctcaagggtgcttattctgattttgttgattgtgatgttattcccatggaagcatgctctttgttacttggttgaccttggcaatatgatactgatagcctgcatcatggtcgttcgaatcattattctttcatttttaagggtcagaaaataattatacatccaatgacacctgaacaaattattaaagatgatcttgtccgagctgctataactgctaaacaacttgatccatcgccctctgttccttctgaaatcaagttgaaggctcctgttttacttgctacacgtgctgattttgatgatctacacggtgctcattttccatgctatgcacttgtatgctctagtgtcctcatttcacttgatgatgcaccatctttggctattccccctatggttgctaaccttttgcaggagtacgctgatgtctttcccaaagacttaccaccgggtctcccaccgcatcgtggcattgagcaccagatcgacctcatccccggcgcacagcttccgaaccgcccaccgtaccgtacaaatccggatgagatgaaggagattctgcaccaggtacaggcgttgcttgacaagggatacattcgtgagtctcttagcccttcctctgttcctgtgttacttgttcccaagaaagatgggtcatggcgtatgtttgtagactgtcgtgctattaataacatcactattcgttatcgatatcctataccacgccttgatgatatgctagatgagcttagtgttgccattattttcactaagattgatttgtgtagtggttaccaccagattagaatgaaactgggtgatgaatggaaaacggcttttaaaacgaaatttggtttatatgaatggttggttatgccgtttggattgactaatgctcccagcacttttatgcgagtgatgaatgaagatctaaggcccttcataggattgtttgtggttgtttattttgatgatatccttatttacagcaaatctaagaaagagcatttggaacatttaagtgctgtttttgatgcattgcgtgctgcccagttatttgctaacatggaaaaatgcttcttttgcacacgacgtgtctcgtttcttggttatgttgttactccacagggcattgaggtggatagcagcaagattgctgccattcggaagtggcctacaccgataacggtcacacaaattcggagctttcttagacttgccggtttctactacagatttgttcgtgattttagctccattgcagcgcctctacatgagcttacaaagaaagatgtgccgtttgcttggagtgattcgcaggaggtagcgttcagcactttgaaagataagttaacctaagctccccctattgcaattgcctgattttaataaagtgttcgagcttgaatgcgatgctagcgatattgggctaggtgctgttttgttacaagaaggaaaaccagtgcttattttagtgaaaaattaagcggtgctagtctaaaatattctacttatgataaggagctttacgctttagtgcacactttgcatacatggcagcactatctttggcatcgtgagttcataattcattctgatcatgaggctttaaaacatattcgtacctgatgtagctgaggtgcccgatctttcggcgagtagagataattccgatttggcggaagatgacccttgcgatccgactacgacgagcaagcccgaggcgccaatgcaatcgctgaaccaactccctgtggttaccgaccttgctgatgcgagatcggcctgatcacgaagatcgtttcctgtgcgcaatcgaagaacgaacaagaacaagatgcgagcaatctaatctattactcgagggtggagttctgaatacacgaagacagcgcagatttgcgcgtgttcgagagtagctaaggctaacgtaaaacaaaactcaggaaataaaggaggcgcagctcctgtataaatagagagggggcgcagcnnctaggggcggccaaccctaggtcgtccattatgggccgcaattgggctggtcgtctattcttccgggccttcgttctttaaca

SEQ ID NO: 321 - DNA, 4868 bp, Zea mays
  source (0)...(0): Zea mays BAC clone full insert sequence contig bacb.pk243.l15.fis79
ttccgaaaatgggtgtcggggtgcatactaagcccgagtttttgccaccggaaccatttcttttttttttgcaacgaacatgcccaatccaatactttaggtccaaatctcatgtttggggtggtttcgcgcaatttcgttgcagcacgtcacccattccgaaaacgggtgttggggtgcatacaaagcacgagttttcgccaccgaaaccatttcttcgtttttctcaatgaacatgcccaatccattactttaggtccaaaactcatgtttgggttggttttgcgcaatttcgttgccgcacgccacccattctgaaaacgggtgtcggtgtgcatacaaagcatgagttttcgccactggaaccatttcttcgtttttcgcaacgaacatgcccaatccactgctttaggtccaaaactcatgtttggggtggtttcgcgcaatttcgttgcctcacgtcacccattccgaaaacgggtgtcggggtgcacataaagcacgagttctttccaccagaaccatttcttcgtttttctcaacgaacatgcccaatccactactttaggtccaaaactcatgtttggggtggtttcgcgcaatttcgttgcggcacgtcacctattccaaaaaacgggtgtcgaggtgcatacaaagcatgacttttcgccaccggaaccatttcttcatttttcgcaacgaacattcctaatccactactttagatccaaaactcatgtttggcgtggtttcgcgcaatttcgttgccgcacgtcacccattcccaaaacgggtgtctgggtgaatacaaagcacaacttttgccaccggaacccattcttcgtttttcgcaacgaacatgcccaatccactactttatgtccaaaactcatgtttgatgtggtttcgctctatttcgttgccgctcgtcacccattccgaaaacgggtgtccgggtgcatacaaagcacgagtttcgccaccggaaccatttcttcgtttttcgcaacgaacatgcccaatccactatttaggtccaaaactcatgattggggtggtttcgtgcaatttcgttgccgcacgtcaccaattccaaaaaagggtgtcagggtgcatacaagcacgagtttttgccaccggaaccatttcttcgttttgcgcaacgaacatgcccaatccactactttaggtccaaaactcatgtttggggtggtttcgcgcaattttgttgccgcacgtcaaccattccgaaaacgggtgtcggggtgcatacaaagcatgagttttcgccaccagaaccatttcttcgcttttcgcaacgaacatgcccaatccactacattaggtccaagactcatgtttggggtggtttcgcgcaatttcgttgccgcacatcacccattacaaaaacgggtgtcgggcggggtgcatacaaagcacgagtttttgccactggaaccatttcttagtttttcgcaacgaacatgcccaatccacaactttaggtccaacactcatgtttggggtggtttcgcgcaatttcgttgccgcacgtcgcccattccgaaaacgggtgtcgggtgcatacaaagcatgagttttcgccaccgtaaccatttcttcgttttttgcaaagaacatgcccaatccactactttaggtccaaaactcattttggggtggtttcgcgcaatttcgttgtcgtacgtcacccattcccaaaacaattgtcggggtacatacaaagcacgagtttttgccaccggaaccacttcttcgtttttcgcaacatacatgcccagtccactactttaggtccaaaactcatgtttggggtggtttcgcgctatatcgttgccgcacgtcacccatttcaaaaacgggtgtcggggtgcatacaaagcatgagtttttgccaccggaaccatttcttcattttccgcaacgaacaagctcaatccactactttaggtccaaaactcatgtttggggtggtttcgcgcaatttcgttgccgcacgtcacccattccgaaaagggaaatttggatccataccattaaaagatcaccactttggatccataccattgctatctcacttacatgtgggtccacatgagtcaatgacatgtggggtccatggtgtatatctaaagtttggatcttttaatggtatagatccaattgttccttccgaaaatgggtgttgggggtgcatacaaagcatgagttttcgccatcggaaccacttcttcgtttttcgcaacgaacatgcccaatccactactttaggtccaaaactgatgtttggggtggtttcgtgctatatcattgccgcacgtcaccaatttcgaaaacgggtgtcgtggtgcatacaaagcacgagtttttgccaccagaaccatttcttcgtttttcgcaacgaacatgcccaatccactactttaggtccaaaactcatgtttggggtggtttcgcgcaattttattgccgcacgtcacccattccgaaaacgggtgtcggggtgcatacaaagcatgagttttcgccaccggaaccatttcttcgttttcgcaacgaacatgcccaattcactactttgggtccaaaactcatgtttggtgtggtttcgcgttatttcgttgccgcatgttacccattccgaaaacgggtgtcggggtgcatacaagcacgagtttttgccaccggaaccattttttcatttttctcaacgaacatgcccaatccactatttaggtccaaaactcatgtttggggtggtttcgcgcaatttcgttgccgcacgttacccattccgaaaacgggtgtcggggtgcatacaagcacgagtttttgctaccggaaccgtttcttcgtttttcgcaacaaacatgcccaatccactactttaggtccaaaactcatgtttggggtggtttcgcgcaatttcgttgccgcacgtcacccattccgaaaacgggtgtcggatgcatgcaaagcatgagttttcgccaccggaaccatttctttgtttttcgcaatgaacattcccaattgactactttaggtccaaaaatcatgtttggggtggtttcgcgcaatttcgttgccgcacgtcacccatcccgaaaacggtattcggggtgcattaaaagcatgagttttcgccaccggaaccacttcttcgtttttcgcaacgaccatgcccaatccacaactttgggtccaaaactcatgtttggggtggtttcgcgcaatttcgttgccgcacgtcacccattccgaaaaccggtgtcggggtgcacaaagcacgagttttcgccaccagaaccatttcttcgtttttctcaacgaacatgcccaatccactactttaggtccaaaactcatgtttggggtggtttcgcgcaatttcgttgccgcacgttacccaatccgaaaacaggtgtcgggtgcatacaaagcatgagttttcgccaccggaaccatttcttcgtttttcgcagcaaacaagcctaatccactactttaggtccaaaactcatgtttggggtggtttcccgcaatttcgatgccgcacgtcacccattccaaaaacgggtgtcgggtgcatacaaatcatgagttttcgccaccggaaccatttcttcgtttttcgcaacaaacatgcccaatccactacgtaggtccaaaactcatgtttggggtgctttcgcgcaatttcgttgccgcacgtcacccattccgaaaacggtagtgggggtgcatacaaagcatgagttttcgccaccggaaccatttcttcgtttttcacaacgaacatgcccaatccactactttgggtccaaaactcatgtttggtgggttttcgcgaaatttcgttgtcgtacgtcacccattcccaaaacgggtgtcgggggtgcatacaaagcacgacttttgccaccggaaccaattcttcgtttttcgcaacgaacatgcccaatccacttctttaggtccaaaactcctgtttggggtggttccgcgctatttcgttgccgcacgtcacccattccgaaaacgggggtcgaggtgcatacaaagcacgagtttttgccaccggaaccatttcttcgttttttgcaacgaacatgcccaatccactactttaggtccaaaactcatgtttgggttggtttcgcgcaatttcgttgccgcacggaactagagatggcaatgggtacccgctactcgaaacccggtgggtttttgctctattagggtatgggtttgggtcaatttctctacccatgggtttgttaatgggttcaaatggaaacccaacgggtatgtgggcatgggtttgttcttccactacccatacccgcaaacccatgggtttttaaaacccgccttaaaatcaacattccttataaatatgtctcataatattattaattgaatatgttctaattgaaataaacttcatgtcacaaattttaggctaaaattagttatcacttgttccttttatgctagcttattaatgtattgattgtcatttacatgatgaaatattttttatgttgatgttagtgggtatgggaaacccgttgggtacccgaaacccgcatgggtatgggtttgggcaaaatttaatacccgtcatgggtatgggttttttagcgagcgtattttttcttcgcgggtatgggtttgggcaagtaatacccaacgggtttttacccattgccatctctacacggaacccattccgaaaacgggtgtcagggtggatacaaagcacgagttttcgccaccggaaccatttcttcgtttttcgcaatgaacatgcccaatccactactttaggtccaaaactcatg

SEQ ID NO: 322 - DNA, 5349 bp, Zea mays
  source (0)...(0): Zea mays BAC clone full insert sequence contig bacb.pk243.l15.fis80
tggtggtaaaataaaggtaacacgttcggtacgtgtccccttttcgctgggttcttattctgattatgctgattgcgatgttattcctatggaagcatgctctttgttattaggtcgaccttggcaatatgatactgatagtttacatcatggtcgttcaaatcattattctttcatgtttaaaggccagaaaataattatacatccaatgacccctgaccaaattttgaaagatgatcttactagggctgctaaaactgcacaacaagtcaaatcgacatcagccgcacctgttaaatctgaaatcaagttgcactctcctgttttacttgctacacgtgctgattttgatgatctccatgaagctcatatgccctgttatgcacttgtatgctcgcgaatgcttgttccgcttgatgatgcaccgtctttggatataccccctgctgttgttaaccttttgcaggagtatgctgatgtttatcctacggacttaccaccgggtcttcctcccctccgtggcattgagcatcagatcgatctcatccccggcgcttctcttccgaaccgcgccccgtaccgtactaatccagatgagacgaaggagatccagcgccaggtgcagacactgcttgataagggttacattcgtgagtctcttagcccttgctcggttcctgttttactcgtcccaaagaaagatgggtcatggcgtatgtgcgtagattgtcgtgctattaataacatcacagttcgttatcgatatcctattccacgccttgatgatatgctagatgagcttagtggtgccgttattttctctaaggttgatttgcgtagcggttaccatcagattagaatgaaactcggtgatgaatggaaaacggcttttaaaacgaaatttggtttatatgaatggttggttatgccatttggattgactaatgctcccagcacctttatgcgtttaatgaacgaagttctacgggccttcataggtttgtttgttgttgtttatttcgatgatatccttatttacagcaagtctatagaggagcatttagaacatttgcgtgctgtttttgacgctttgcgtgctgctcgcttgtttggtaacatggaaaagtgcacattttgcacgcaacgtgtctcgtttcttggttatgtggttactccgcagggcattgaggtggatagcagcaagattgctgccattcgggagtggcctacaccgacgacggtcacacaaattcggagctttcttggacttgccggtttctaccgcagatttgttcgtgattttagctccattgcagcgcctctacatgagcttacaaagaaagatgtgccatttgcttggagtaattcgcaggaggtagcgttcagcactttgaaagataagttaacccaagctcccctattgcaattgcctgattttaataaagtgtttgagcttgaatgcgatgctagcggtattgggctaggtgctgttttgttacaagaaggaaaaccagttgcttattttagtgaaaaattaagcggtgctagtctgaaatattctacttatgataaggagctttacgctttagtgcgcactttgcatacatggcagcactatctttggcatcgtgagtttataatccattctgatcatgaggctttaaaacatattcgtacccaaacaaatctgaaccgtcgtcatgctaaatgggtagaattcattgagtcctttccttacattattaaacacaagaacgggaaggataatgttattgctgatgctttgtctcgtcgctataccatgctgtcacagttagattttaaaatctttggtttggacactgtgaaggatcaatatgttgacgatgctgattttaaagatgctttcggccattgtattaatgggaaaccatggggcaaatttcacatacaggatgggttcctgtttcgcgctaacaagctgtgtgttccagctagctcggttcgtcttttgttgttacaggaagcgcatggaggcggtctcatggggcattttggcgtctacaagacacatgaggtgttggctgcccacttcttttggcctcggatgcgcgctgatgtggagcgccttgttgcacgctgcactacttgtcagaaagctaagtcacggttgaacaaccatggtttgtatatgcctttgcctgtcccttcttctccttggcttgatatctctatggactttgttttgggcttgcctagaactaagaaggggagggatagtatttttgtggttgttgatagattctctaaaatggctcactttataccttgtcataaaactgatgatgctagcattgttgctgaattgttctttagagaaattattcgtttacatggtattccaaaaacaatagtctctgatcgcgatgctaagtttctaagccatttttggagatctctttggaataaattgggaactaaattgttgtttagcactacttgtcaccctcagactgatggacaaactgaggtagtaaatagaactttatctaccatgcttagggctgttttagacaagaatttgagacgttgggaggattgcttgcctcatgttgaatttgcttacaatcatgccacgcattcttctacaaagatgtgccctttccagattgtttatggttacattcctagggcacctattgatttgatttcacttaatgctgcgaacgccccacatgtagatgcttctgcacatgttgaacaaatgattaccatacatgaacaaacgaaacagaacattgctgctactaatacaaaaaatcaggttgctggtagtaaaggaagaaaacatgttacttttgaacctggtgatatggtttggttgcatttgagaaaggatcgttttcctactttgcgccgttctaaattgatgcctcgtgctgctggtccttttaagatactaaccaagattaatgataatgcttataccctcgacctacctgcggagtttggtgtttccactagttttaatgttgcagatttgaaaccgtatgcgggagaagatgaggagttgccgtcgaggacgacttcagttcaaaaaggggaggatgatgcggacatcaacaccaacacgagcacatctacaccagcagcaccttctccagcccaggcgccaccccttccacctgggccagtgactcgggcccgtgcaagagaattgaactacatcatgttgttaaagaacgaaggcccggaagaatagacgaccagcccaattgcggcccataatggacgacctagggttggccgcccctaggggctgcgccccctctctatttatacaggagctgcgcctcctttatttcctgagttttgttttacgttagccttagctactctcgaacacgcgcaaatctgcgctgtcttcgtgtattcagaactccaccctcgagtaatagattagattgctcgcatcttgttcttgttcgttcttcgattgcgcacaggaaacgatcttcgtgatcaggccgatctcgcatcagcaaggtcggtaaccacagggagttggttcagcgattgcattggcgcctcgggcttgctcgtcgtagtcggatcgcaagggtcatcttccgacaaatcggaattatctctactcgccgaaagatcgggcaccttagcttcatcagaacatgtccaatccactactttgggtccaaaactcatgtttggtgtggtttcgcgtaatttcgttgtcgtacgtcacccattccctaaacgggtgtaggggtgcaaacaaagcacgacttttgccaccggaaccaattcttcgtttttcgcaacaaacatgcccaatccactactttaggtctaaaactcatgtttggtgtggtttcgcgctatttcattgccgcacatcacccattccgaaaacgggtgtcggggtgcatacaaagcacgagtttttgccaccggaaccatttcttcgtttttcgcaacgaacatgcccaatccactactttaggtccaaaacacatgtttgggttggtttcgcgcaatttcgttgccgcacgtcacccattccgaaaacgggtgttagggtggatacaaagcacgagttttcgccacaggaaccatttcttcgtttttcgcaacgaacatgcccaatccactacttcaggtcccaaactcatgtttggggtggtttcgtgcatattggttgtcgcacgtcaccaattccgaaaacgggtgtcagggtgcattaaaagcatgagttttcgccaccggaaccatttcttcgtttttggcaacgaacatgcccaatccactactttgggtccaaaactcatgtttggggtggtttcgcgcaatttcgttgccgcacgtcacccattccgaaaaccggtgtcggggtgcataaaaagcacgagttttcgccattggaaccatttcttcgtttttctcaacgaacatgcccaatccactactttaggtccaaaactcatgtttgggggtggtttcgcgcaatttcgttgtcgcacgtcacccattccgaaaacgggtgtcgggtgcatacaaagcatgagttttcgccactggaaccatttcttcatttttcgcaacgaacatgcccaatccactacattaggtccaaaactcatgtttggggtggtttcgggcaatttcattgtcgtacatccctcattcccaaaacggctgtcggggtgcatacaaagcacgagtttttgccaccggaaccaattcttcgtttttcgcaacgaactttaccaatccactactttaggtccaaaactcatgtttggggtggtttcgcgctatatcgttgccgcacgtcacccattccgaaaacgggtgtcggggtgcatacaaagcatgagtttttgccaccggaaccatttcttcgtttttcgcaacgaacatgcccattccagtactttaggtccaaaactcatgtttggggtggtttcgcgcaatttctttgccgcacatcacccattccgaaaacgggtgtcggggtgcatacaaagcatgagttttcgccaccggaaccatttcttcgtttttcgcaacgaacatgcccaatccactactttaggtccaaaactcatgtttgtggtggtttcgcgcaatttcgttgccgcacgtcacccattccgaaaacgggtgtcggggtgcatacaaagcacgagtttttgccaccggaaccatttcttcgtttttcgcaacgaacatgcccaatccactactttaggtccaaaactcgtgtttggggtggtttcgcgcaatttcgttgtcgcacgtcacccattccgaaaacgggtgtcgggtgcatacaaagcatgagttttcgcc

SEQ ID NO: 323 - DNA, 5826 bp, Zea mays
  source (0)...(0): Zea mays BAC clone full insert sequence contig bacb.pk243.l15.fis81
ccgcagggcattgaggtggatagcagcaagattgctgccattcgggagtggcctacaccgacgacggtcacacatattcggagctttcttggacttgccggtttctaccgcagatttgttcgtgattttagctctattgcagcgcctctacatgagcttacaaagaaagatgtatcgtttgcttggagtgattcgcaggaggtagcgttcagcactttgaaagataagttaacccaagctcccctcttgcaattgcctgattttaataaagtttttgagcttgaatgcgatgctagtggtattgggctaggtgctgttttgttacaagaaggaaaaccagttgcttattttagtgaaatattaagcggtgctagtctgaaatattctacttatgataaggagctttacgctttagtgcgcactttgcatacctggcagcactatctttggcatcgtgagttcataattcattctgatcatgaggctttaaaacatattcgtacccaaacaaatctgaaccgtcgtcatgctaaatgggtcgaattcattgagtcctttccttacattattaaacacaagaacgggaaggacaatgttattgctgatgctttgtctcgtcgctataccatgctgtcacaattagattttaaaatatttggtttggacactgtgaaggatcaatatgttgacgatgctgattttaaagatgctttcggccattgtattaatgggataccatggggcaaatttcacatacaggatgggttcctgtttcgcgctaacaagctgtgtattccagctagctcggttcgtcttttgttgttacaggaagcgcatggaggcggtctcatggggcattttggcgtctacaagacgcatgaggtgttggctgcccacttcttttggcttcggatgcgcgctgatgttgagcgccttgttaaacgctgcactacttgtcagaaagctaagtcacggttgaacaaccatggtttgtatatgcctttgcctgtcccttcttctccttggcttgatatttctatggactttgttttgggcttgcctagaactaagaaggggagggatagtattttcgtggttgttgatagattctctaaaatggctcactttataccttgtcataaaactgatgatgctagcattgttgctgaattgttctttagagaaattattcgtttacatggtattccaaaaacaatagtctctgatcgcgatgctaagtttctaagccatttttggagatctctttggaataaattgggaactaaattgttgtttagcactacttgtcaccctcagactgatggacaaactgaggtagtaaatagaactttatctaccatgcttagggctgttttagacaagaatttgagacgttgggaggattgtttgcctcatgttgaatttgcttacaatcatgccacacattcttctacaaagatgtgccctttcgagattgtttatggttacatccctagggcacctattgatttgatttcacttaatgctacgaacgccccacatgtagatgctgctgcacatgttgaacaaatgattaccatacatgaacaaacgaaacagaacattgctgctactaatgcaaaaaatcaggttgctggtagtaaaggaagaaaacttgttacttttgagccaggtgatatggtttggttgcacttgagaaaggatcggtttcctactttgcgccgttctaaattaatgcctcgtgctgctggtccttttaaggtgctaacaaagattaatgataatgcttatatccttgacctgcctgcggaatttggtgtttccactagttttaatgttgcagatttgaaaccatatatggccgaggatgaggagttgccgtcgaggacgacttcacttcaagaaggggaggatgatgaggacatcactatgagtacgactacaccagcagcacctcaacatcaagcgccacttccttcattagctgggccaatcactcgggcccgtgccagagatcttaacttcgtcattgtactaaggaatgagggcccagaagaatagacgaccagcccaactgcggcccatagtggacgacctagggttggccgcccctaggggctgcgccccctctctatttaaacgggagctgcgcctcctttgttcttcgagttttgttttacattagctttagctactctcgaacacgcgcaaatctgcgctgtcttcgtgtattcagaactccaccctcgagtaatagattagattgctcgcatctttttcttgttcgttcttcgattgcgcacaggaaacgatcttcgtgatcaggccgatctcgcatcagcaaggtcggtaaccacagggagttggttcagcgattgcattggcgcctcgggcttgctcgtcgtagtcggatcgcaagggtcaacttccgccaaatcggaattatctttactcgccgaaagatcgggcacctcagctacatcacaaggctcttgtcaatatgagcaactgtcatttccacatttgcaagtttggtgtttgtgtcgatctgtgtggcctccaattgccccatcttttcattcgtcacctgcatgtcattatcaagaccttccgtgtgcgtcttcaccatccttacaaagtgttgtatgatacccttggtgcgaggagagtgtggcatattacgggaagcatcatcaacctccaatcctgccatggttagacgaacagaggcaacaagaaaaaaaacgtgaaggaataaaaactctacaactattaggatgtagctactgcaaggcgctcactctcaacctgtcacacaagctcttaccaattcttaccttgcacaacaggaggggtcagcaaccaacaagtctgcaaccgtggaataagtgtatcggtgccgcaacaacacgacctgtcaaactgtagtcgaaatatgtagagttgtaggtgggctgaagcaaggaatacactagtaccacgtttgttacaaaagcaagctgaataatcgttcaacggtggtactgtgctggtcctaggctaaaccatgctagagacgtgagcctaggcataaaggtagtcactgaaaaagaacaactagcacagcacaaagagaaacaacagatttagagattcagcccccttctttcttcttcttttccttttttttcttttcttttttcttcttcttttttttgcaggggcctaaaccctttttttcactatgacaacccaaacaataaggatattgctaacagcccctttaaatcagatttaacaaatcttgttaatatagaaagtccagaaatctctacgatgattgcggagcgctcagaatgaattttgagacaaggtcagatccgttggaaataagataagataagctttccagattgtatttaaacttccaaatcggacatgagatgtatccgtggtggcaaaaacgaagtttatggtgatggtggatctcgtggtgaccaaaacgtggtagaactcaaaactctaaaaaaataaactaagaccagcaactcgacacaaccgatgcaaccaaaaactcaacaagccctagctaagtagtactagtaaatggtcaatggtttataggattgcggtaaaactaatctactatttttttggctttttctggactataggagataagaaaacagcgaagaaaagtaaatctctcaccgataaaccttgctctgattaccaactgatgtgcacccgttgggtgattgcccgatctttcgatgagagggtgtggaataactcgattgggggaggagacgacgttcacggcccgactacagccttccaaagacgctgcgccttagcaaccgatacaccacctcctatggctgtcacgatcttgtggagcgtgacaccctggccactagggcactcgtcctgcaagaaatcgaagaactagcaagaacaagtagaacaagtactgaattaccagatctaaatgtaggtttcaaaatcaaactccaatatggtggggttccaaagacaagaagacgggcggctgaaccagcacgcgcgcttacaagcaagtagcgagagctaaacttgatctaaaaaaacccgctgttcttggtggcggctagggggtttataaacatgggaggacgaccacaagggtattggggtcgtgctgcaaccctaggatgcgtcactaatggacccaacttgatacacgacccattgggccaaaatagggtcacgcagcaccatgggcagaaaaggcaggaaatgtctcggtaaggaaacaatgattatggcggcctcagaacagatatgactataattccggatccatatgaaagtagacttgataggctttccatgttgtgcttgaacattccaatccgagcccgcatgtgaccgtggtgaccgtcacaagttgatgttcttctgcagtccgaatccagcatgttcaaatcattttccctttcggtcttctccctggttcctaagcaaaacaagagtgcacgggtctccatggtctaaatatgatggacatgcattcaagagtgtaatcacctgatggttgagttgacgagcacgagcgcgagtaatgggaccagaagtaatgggaccagaaattggtacttgtattggcatagatgtatcagtagtgtagatgtcttcatcaaaccctctctaagagggccctagtccttccttttataggcgtaaggagaggatccaggtgtacaatggggggtgtagcagagtgctacgcgtctagcggaggagagctagcgccctgagtacatgtcgtcgtggcagccggagagattttggcacccagctggtgtgatgtcgtggccgtcggaggagtgctggagcctggcggagggacagctgtcggagctgttgagtccctgctgacgtccttttgcttccgtaagggggctgagagccgccgtcgtcaccgagtgtgcggggcgccatcattgcctatctggtggagcgagccagatgggacgccggtcttgtttcccgtggcccgagtcaactcggggtagggcgatgatggtgcctcctgttgacgtggccggtctgcgccctaggttgggcgatgtggaagctcctccgaagccgaggtcgagtctgccttccgtggccgaggtcgagtccgagcccttggtcgggcgaggcggagaccgtcggctgaggccagggctgagtccgggccttggggtcgggcgaagcggagttcgtcatcttctgggggctgagcccgagtccgagccctagggtcgggcgaagcggagtttgtcgtcttctggggctgtgcccgagtccgagccctgggatcgggcgaagcggagttcgtcgtcttctgggctgagcccgagtccgagccctgggtcgggcggagcggagttcgccgtcttccggggcttagcccgagtccgagccctgggtcgggcggagtggagttcgccgtcttccggggcttagcccgagtccgagccctgggtcgggcggagcggagttcgccatcttccggggcttagcccgtgtccgagccctgggtcgggcggagcggagttcgccgtcttccggggcttagcccgagtccgagccctgggtcgggcggagcggagttcgtcgtcttccggggcttagctcgagtccgagccctgggtcgggcgaagcggagcttcctatggtgtctgcggccgggcctgactgcctgtcagcctcactctgtcaagtggcaccgcagtcggagcggtgcaggcggcgctgtctttctgtcaggccggtcagtggagcggcgaagtgatggtggtcacttcggctctgtcg

SEQ ID NO: 324 - DNA, 789 bp, Zea mays
  source (0)...(0): Zea mays BAC clone full insert sequence contig bacm.pk147.d02.fis1
  misc_feature (1)...(789): n = A,T,C or G
annnnnnnnnnnnnnnnnnnnnnnnnnnnnnnnnnnnnnnnnnnnnnnnnnnnnnnnnnnnnnnnnnnnnnnnnnnnnnnnnnnnnnnnnnnnnnnnnnnnnnnnnnnnngatacctataaatacccccgcacagtgcccttgagaggctagattaacagagcttttgccatctcgaattgaaaccttgtttacgttgcccccactcccccgttggatcaacttgctcgggagagcaagttccaacatttggcgcccaccgtggggctcgaacccacgaccttgctgacctcgccgaaacgtttgcgaacatgcgggacgcacgacttcgcctaaaccccgaaaagtgcgtcttcggcgttcgccaggggaaaatattgggctacctggtgtcacaccacggaatcgaggccaacccaaccaaaattcaggccatcatcaacatgacgcccccgcagtcagccagagacgtccaacgcctgacaggcagattggccgcccttaacagattcatctccaaatccgcagagcgaagtctccctttcctcaaaactctccgcggcgcanaagacttcgcttggggaccagagcaggcggcgtccttcgccttattgaagcagtacctgttggaattggcgatttttacaagccccgactcctcgctacccctgttgctctatgttgcggcttcgccacatgcggttagcgcagcattggttcaagagcagaccacagagggcatgatcaggcaatgtctagtttattacgtctccgaagtgctcacaccatc

SEQ ID NO: 325 - DNA, 777 bp, Zea mays
  source (0)...(0): Zea mays BAC clone full insert sequence bacm.pk147.d02.fis2
  misc_feature (1)...(777): n = A,T,C or G
atcgccnnnnnnnnnnnnnnnnnnnnnnnnnnnnnnnnnnnnnnnnnnnnnnnnnnnnnnnnnnnnnnnnnnnnnnnnnnnnnnnnnnnnnnnnnnnnnnnnnnnnnnntcaattggtatcagatttccaggttgatcggtgagtttatcgagcgttttttttcctacagtccacaaaaccacataaaaattcaggttagatcttatcccagcacccttttgagcctcgcactttctttcaataatctgcattgttgaatttgtgtgctttcgcgtcatttgttgctggttgcattgtgttcttccaccattcaaaccctagcgtcgccaccatctcccgtttgatcacgccacaaaccgagtcaacatcgtttccttatttttctccttcggttacgtcaaaaaaaaaacagaaaaaacaaaccgagtcaacggccgtttccttgattttctccttcggttacgaaaaaaaaagaaaaaaaaacataccgagtcaacggccgcttccttgtttttctccttcggttacgtcaaaaaaaacagaaaaaaaagataacgaaggagaaaggatacagttgcttcatcccggtcgtttttagaacataacttgaggtaccttccgtaaaacgggcataacttttcgctcgggtgtccaaaaaatctgaaatttttacaggagcttgttgacaccattctgagcccgggcaaactgacctccggtctgtttgggttcgaccaaatgtcaaaaaattcggaaaataaagaaaaatccgtcaa

SEQ ID NO: 326 - DNA, 728 bp, Zea mays
  source (0)...(0): Zea mays BAC clone full insert sequence contig bacm.pk147.d02.fis3
  misc_feature (1)...(728): n = A,T,C or G
gacnnnnnnnnnnnnnnnnnnnnnnnnnnnnnnnnnnnnnnnnnnnnnnnnnnnnnnnnnnnnnnnnnnnnnnnnnnnnnnnnnntcgttttaaaagccgttttccattcatcaccgagtttcattctaatctgatggtaaccgctacgcaaatcaaccttagagaaaataacggcaccactaagctcatctagcatatcatcaaggcgtggaataggatatcgataacgaactgtgatgttattaatagcacgacaatctacgcacatacgccatgacccatctttctttgggacaagtaaaataggaaccgagcaagggctaagagactcacgaatgtaacccttatcaagcagcgtctgcacctggcgctggatctccttcgtctcctctggatttgtacggtacggggcgcggttcggaagagaagcgccggggatgagatcgatctgatgctcaatgccacggaggggaggaaagaccggtggtaagtccgtaggataaacatcagcatactcctgcanaaggttaacacagcaggnggtatatccaaagacggtgcatcatcaagcggaacaagcatgcgcgagcatacaagtgcataacagggcatatgagcttcatggagatcatcaaaatcagcacgtgtagccagtaaaacaggagagtgcaacttgatttcagattaataggtgcggctgatgtcgatttgacttgttgggcagttt

SEQ ID NO: 327 - DNA, 761 bp, Zea mays
  source (0)...(0): Zea mays BAC clone full insert sequence contig bacm.pk147.d02.fis4
  misc_feature (1)...(761): n = A,T,C or G
atcgcnnnnnnnnnnnnnnnnnnnnnnnnnnnnnnnnnnnnnnnnnnnnnnnnnnnnnnnnnnnnnnnnnnnnnnnnnnnnnnnnnnnnnnnnnnnnnnnnnnnnnnngatatattttatattgctggcaagtacaacaacataggacaatttcttgtgcatagaatttctatttcatctagatatgttgtttcttcactttgtgcaaataagatattggtatgttctcaagaagaaaagaatctcttgtttccatgtactttagttgaagtttcaggtttatatttgaaagacattaataaaagcttagtcatcaacatcaagcatgatgcaaaaccgaggacggtttgctatcaagaaggggagaatgatgagaacataacccgtacagatatgaccatgttaatggctcctgctacaaagacattgaggaacaaagaagttgattggggaccaagtaatgatatttccaacatttccaacaaagcaagcacatcatcaaatttaaagatatacttgggtgaggagcatacactagagtcgaggacgactctattacaagaaggggaggatgatgaggacatcactgccatcaatacaccacaccagcgacctctttcaccatttaatcatggaccagtgaaacgagtccgtgcacgtaaatttaattatcaggtgaactcgttccnttgnntgtgaagctaatcattccttanatgaggtactaataccttgtgattactttnnatatctaaggtgtt

SEQ ID NO: 328 - DNA, 699 bp, Zea mays
  source (0)...(0): Zea mays BAC clone full insert sequence contig bacm.pk147.d02.fis5
  misc_feature (1)...(699): n = A,T,C or G
cnnnnnnnnnnnnnnnnnnnnnnnnnnnnnnnnnnntaaattccactcggtcgaggtcgacggnatcgttactgcaagagtacatcatctgcaccaatctgttcttcgggtggttccttagtgcctgcatcatcagccgcaagcaaagcaagtgtagcttcatccaaatcactagcagaggaatacccaccatcattttttaccaccaaaacacgctgattaggacaatcacgctgcacgtgtccatagcccttgcatcgataacacagaacatctcttgttctacccgtggaggctactgaagaggcactacctgctggtttctgggcagatttggttgctgaatttgtggaagatgcacgtggtttgtcgccggaggaaggcgggggtgctggtcgacttggcgagggagttggtgctggtgtacggccggtcatggacgtagtcgtgcgctgttgccatggtgtagattttcctgcagaaacattagaccttgcactagcacgtcgtccctgcacttccctttcagctttgcaagcaagatggaacaatcgggttacattagcataatctttataagcaaggatgtcttgaatttnnccctattaacccggccaaaaatctagccatagcagaatccntcaccctcctctatgnntacacgcagcattacccatttggtaattctggatataatca

SEQ ID NO: 329 - DNA, 791 bp, Zea mays
  source (0)...(0): Zea mays BAC clone full insert sequence contig bacm.pk147.d02.fis6
  misc_feature (1)...(791): n = A,T,C or G
atcgccnnnnnnnnnnnnnnnnnnnnnnnnnnnnnnnnnnnnnnnnnnnnnnnnnnnnnnnnnnnnnnnnnnnnnnnnnnnnnnnnnnnnnnnnnnnnnnnnnnnnnncagcacgcatgtgatcaacatgttcatccatagatttgctgtagatcaatatgtcatcaaagtatactaccacaaattttccaatgaaggcacgcaaaacctcgttcattaatctcatgaaagtgctaggtgcattagttaacccaaaaggcatgactaaccactcatacaatccgaacttagttttgaaagcagttttccattcatctcccaatttcatacgaatctggtggtacccactacgcaaatcaactttagaaaagacgatggcaccactcaattcatcaagcatatcatctaaacgtggaatagggtgtcgataccgtatcgtgatattattaatagccctacaatcaacacacatacgccatgttccatcttttttaggcactaaaataaccggaacagcacacggactaagagactcacgcacgtaacctttgtcgagtagttcttgcacttgtcgctgaatttctttttgttcctctggatttgtcctatatggcgcacgatttnggcaagatgcaccaggaaaatagatcatttngtgctcnnatcctcgtatangtggcagcccctctggtatctcacttggaatacatcagaatactcctgcaaaaatgtagtnaatacagggagcaanngatgctgcatatcntggaattgaantcaaagcatccttt

SEQ ID NO: 330 - DNA, 719 bp, Zea mays
  source (0)...(0): Zea mays BAC clone full insert sequence contig bacm.pk147.d02.fis7
  misc_feature (1)...(719): n = A,T,C or G
gaccgcgaannnnnnnnnnnnnnnnnnnnnnnnnnnnnnnnnnnnnnnnnnnnnnnnnnnnnnnnnnnnnnnnnnnnnactgcacgaaactactaaagaaaacatagagcgtatgaatgctagatataagtttgctagtgataaaggtagaaaggaaataaattttgaacctggagatttagtttggttgcatttgagaaaggaaaggtttcctgaattacgaaaatctaagttgttgcctcgagccgatggaccgtttaaagtgctagagaaaattaacgacaatgcatataggctagatctgcctgcagactttggggttagccccacatttaacattgcagatttaaagccctacttgggagaggaagttgagcttgagtcgaggacgactcaaatgcaagaaggggagaatgatgaagacatccacactactgatgcatctataccaatacaagtaccaatttctggtcccattactcgcgctcgtgctcgtcaactcaaccatcaggtgattacactcttgagttcatgtccatcatatttagaccatggagacccgtgtactcttgttttgcttaggaatcagggagaagaccgaagggaaaaggatttgacatgctggattcggactgcagaagaaacacaacttgtgacggtcaccacggtcagatgcgggctcggattggaatgttnncagcacacatggaaagcttatc

SEQ ID NO: 331 - DNA, 893 bp, Zea mays
  source (0)...(0): Zea mays BAC clone full insert sequence contig bacm.pk147.d02.fis8
  misc_feature (1)...(893): n = A,T,C or G
ctcaaaagtcgttcctaagggaatgcagagccaaataccaccgaaatagaaggtgaagaagctccaaagtcgttcctaagggaatgcagagcttaaatgccaccgaaatagaaggtgaagaagctccaaagtcgttcctaagggaatgcagagcttaaatgcaaccaaaatagaaggtgaagagactccaaagtcgttcctaagggaatgtagagtctgggtatggtttcgtgtgtgttcgggtcatacatttgcatatttcatggcatcattctttgcattcatacaaacatttattagacattcgtaggatcatcatcatgatgacaagaagcacggacaataatatgaacagaaagagttgtacggcttcggtgacaaaatgcttcgttgaatatgaaaaagcttcgtctcagacaagaacagaggcattttatacaatgaaatgctccgatgtgtacgaaaagaagggaaggtgtttttcgccttcggctcaaaagttatacttatgggtttcgtccatagcaaagcaattcacacatggatggaaagttaaaattatattacaaggtatggacaaataaacacaatatcgagttcagccctcaattacaatcttttgcaaaataatgcaaaaagatcctaggctctatgcagggtcataaaagtaagcttcagcccagcaaccttcggaatgcgcttcggctcactgaccttcggtgccgccatcctgcagacaaacaacggtatgaggtaaatgcgatggtaataaagaaaaatcaaggcaaataacaggtgcaagtttcgtaccgaattaagcaaattccngggcttcgtctgcagctaactctcgtccgcctttagcccaaatttgagtaaataatctttttcta

SEQ ID NO: 332 - DNA, 666 bp, Zea mays
  source (0)...(0): Zea mays BAC clone full insert sequence contig bacm.pk147.d02.fis9
  misc_feature (1)...(666): n = A,T,C or G
gttttcatataataatagctatcaagaaagcatcaagatggcacccttcgaagctttatatggacgacgatgttgtactctgctaaattggtctgaacctggtgaaaggtacttcttcaggcctgatatggtgaaagagactcaagagaaggttcaaaaaataattcataatatgaagaaagcccaagctcgtcaaaagagttatgcagaccggcgacgacaacccttatactttctcgtgggagattatgtctacttgaaagtttcaccaatgaagggtgtattgcgttttgggattaaagggaagcttgcacccaggtacattggtccattccctgtacttgagcaatgtggaccagtggcataccgacttcaactacccgaaactttgtctgctgttcataatgtgttccacgtgtcccaattgaagaaatgtcttcgggttcccaatcgaaccattgaagtgacagatgttgtccttgaaccagacttgacatattccgagcatcccattcgagtcttggatcagaaggacaggattacccggagaaaaactctcaagttttacaaggtacagtggaaccaacattccgaagatgaggctacatgggaaactcaagactttttagataagaatttcccaggcttttagcctcntgtaattgg

SEQ ID NO: 333 - DNA, 1219 bp, Zea mays
  source (0)...(0): Zea mays BAC clone full insert sequence contig bacm.pk147.d02.fis10
  misc_feature (1)...(1219): n = A,T,C or G
catgctcattttctccccttgggatatttttatagaaaatccctcgaaagaagcttccaatctttggacaacatccaaatacttctcaagcttcggatctcttgccttgctactcttatccacgtggccagaaataacttgcgaatcagttttgaggattgccctttttattcccattgcctttagttttcgaagctccaaaagaagggcttcgtactcggcaatgttattcatacaactgaactctagctttattgcataacatgttataactttagagggtgcaactaggacagcaactgctcctgcaccgaatgtaccccaagatccgtcacaaaataccgtccaagcttcggcatcttttgtcacttcttgaccctgagcccctggcgtccaataagcgatgaagtctgctaacgcctgagattaaattgaggatctgtgcacataatcaatggtgaatttcattaagtctgtgacccattttccgatccttcatgtagcttctctattcctcattatgtctttcaaggattgcgatgaaggcactattatatgatgtgcttggaagtagtgctgaaagctccttgaagccttcaatacagcatacagtacattctccaattctgtattatttttatttgacaggctgagtacttcggagacgaagtgtaccggcgcttgcttttttatttggccatcttgcttctcctgtacaagtgtcgcactaaccgcagcatgggaagcagccacatacagaagtagcggagttcctgatgaaggtggggttagagttgtcaactctatcatatattgctttaattcttcgaaggctttctgttgaaccggaccccactggaagacttcggctgactttagtatttcaaagaatggtaaatttctctctgctaatcgtgagataaatctattcaacgatgccagccttcctgccaaccgttgagcccccttctttgaatttggtggctccatccgaaggatagcttcgatcttgcttggattagcttcgatacctttagttgataccaggcaaccaagaaacttgcccttcttcactctgaaaacacatttttcggggttcaacttgagaccagcttgtctaaaattggcaaacgtctcttccnaatcagcaacatcattttcttgttttgtgcttttcactatgatgtcatcgacataagtcaacacattcctacctatt

SEQ ID NO: 334 - DNA, 784 bp, Zea mays
  source (0)...(0): Zea mays BAC clone full insert sequence contig bacm.pk147.d02.fis11
  misc_feature (1)...(784): n = A,T,C or G
tctttgctaggcgagaaattctactttgatgtttggatgaagggcggtcgtgagatggccgatgaagccattaaaaagagcgaaaaagaaactcacgacgctcgaaaggaggcaaagcaagctgaagaagctgctgaacgagccatgattataggtacttatatttaaagtttcgcttcatcgttcgcttctagcttcgaggtttatcaacatattcttttattgcagctagactttcacccccgccagagccgtacaaccctgaggtcgacccggttatgaaagaagctttagatgtaatgaagattggcaacgaagtcgttgacaaagtcgtcggcatactattgcatgaagttgctgagaaaataataaaggaagattaaatttttgtatgcttgaaaaatgtaatgcttgtgtatggttgcctccatgtgtacgaaacaaacataaagtacttgtatgtacattagtgtaatatatatctttgtgatgcatgaaatatgcgtacatatcatttttgagcctttggcgaaaaaacaccttcccttcttttcatgcttggcaaagaaaatcttccttacgccacttttgacgaaggttggcttcatataattcaatatgtctgacgaaggtatatgtcgtgctatagcacattttttgcgattcgacaagtatttttgaaggagtaatttcccttcttctccacagccttttgttgatgcanaatgatgtatgatgagatgctatgcgatatggtatgattgtatgatgcanaatgatgttt

SEQ ID NO: 335 - DNA, 1139 bp, Zea mays
  source (0)...(0): Zea mays BAC clone full insert sequence contig bacm.pk147.d02.fis12
gactagcaccgcttaatttttcactaaaataagcaactggttttccttcttgtaacaaaacagcacctagcccaataccgctagcatcgcattcaagctcaaaaactttattaaaatcaggcaattgcaagaggggagcttgggttaacttatctttcaaagtgctgaacgctacctcctgcgaatcactccaagcaaacggcacatctttctttgtaagctcatgtagaggcgctgcaatggagctaaaatcacgaacaaatctgcggtagaaaccggcaagtccaagaaagctccgaatttgtgtgaccgtcgtcggtgtaggccactcccgaatggcagcaatcttgctgctatccacctcaatgccctgcggagtaaccacataaccaagaaacgagacacgttgcgtgcaaaatgtgcacttttccatgttaccaagcaagcgagcagcacgcaaagcgtcaaaaacagcacgcaaatgttctaaatgctcctctatagacttgctgtaaataaggatatcatcgaaataaacaacaacaaacaaacctatgaaggcccgtagaacttcgttcattaaacgcataaaggtgctggagcattagtcaatccaaatggcataaccaaccattcatataaaccaaatttcgttttaaaagccgttttccattcatcaccgagtttcattctaatctgatggtaaccgctacgcaaatcaaccttagagaaaataacggcaccactaagctcatctagcatatcatcaaggcgtggaataggatatcgataacgaactgtgatgttattaatagcacgacaatctacgcacatacgccatgacccatctttctttggaacgagtaaaacaggaaccgagcaagggctaagagactcacgaatgtaacccttatcaagcagcgtctgcacctggcgctggatctccttcgtctcatctggatttgtacggtacggggcacggttcggaagagaagcgccggggatgagatcgatctgatgctcaatgccacagaggggaggaagacccggtggtaagtccgtaggataaacctcaatcaaggtatcgatccgtcgcctcgcgagttgtaggtcccattccccataggatctatcgcctc

SEQ ID NO: 336 - DNA, 876 bp, Zea mays
  source (0)...(0): Zea mays BAC clone full insert sequence contig bacm.pk147.d02.fis13
  misc_feature (1)...(876): n = A,T,C or G
aatatagccccaagtatttaaagaagagagcaaatttatttcttcagtttcgtttgcaatacaaattacatattcctttttagccaaaatgtttggttcaataatagatgtaacatgttcatttactagttgttgtcttagtacatgtgaatcattatcccacaaatcttcactatcacaagtgtcagcaatcaattcttcttgtgatgatggaaaaaacagctggtttcattattttgtgttcttgatcagcatgtagagcagatgcaaaagaggaactatggctcacatgttcagtgcttgtataattgtataatagaatctcattttcagctttacatgctagcaaaaacaagtgagaaatgtgtttgtatgcttcatgcatgactatagtctgaatttcagaattaagtcctttcatgaacctagtcatgacatcttccatgcattcatctaaacgagcaaacatggtacaaattttaaaatcataataataatctttcacagtcctagcaccctgctttaaggtgtctaatttagaaagcaaatgatcagcatagtatgcaggaatgaatgcatctctaaaatgaagtttgaagtcttcccaagattgtggaactttgttgtgcctacaaatgtatttccattccatcaatgcgtgctcagttaacaaattagaggcaatataaatcttttgtttttgagatagatcatgcttatcanattccttatctacctttagctcccaatncatgtatgcatgangatcgaatttaccggcatataaaggcaagtgttgaatgatgcctccaatataacgttcggttgggtcaaaaatgtccatatcacctgccccatgttagtaagacagaacaa

SEQ ID NO: 337 - DNA, 772 bp, Zea mays
  source (0)...(0): Zea mays BAC clone full insert sequence contig bacm.pk147.d02.fis14
  misc_feature (1)...(772): n = A,T,C or G
tagagacgattaaagaccaatatgttcatgatgctgattttaaagatgtgttgctgcattgtaaagatgggaaaggatggaacaaatatatcgttagtgatgggtttgtgtttagagctaacaagctatgcattccagctagctccgttcgtttgttgttgttacaggaagcacatggaggtggcttaatgggacattttggagcaaagaaaacggaggacatacttgctggtcatttcttttggcccaagatgagaagagatgtggtgagattggttgctcgttgcacgacatgccaaaaggcgaagtcacggttaaatccacacggtttgtatttgcctctacccgttcctagtgctccttgggaagatatttctatggattttgtgctgggattgcctaggactaggaagggacgtgatagtgtgtttgtggttgttgatagattttctaagatggcacatttcataccatgtcataaaactgacgatgctactcatattgctgatttgttctttcgtgaaattgttcgcttgcatggtgtgcccaacacaatcgtttctgatcgtgatgctaaatttcttagtcatttttggaggactttgtgggcaaaattggggactaagcttttattttctactacatgtcatcctcaaactgatggtcaaactgaagttgtgaatagaactttgtctactatgttaagggcagttttctaagagaatattnagatgtgggaggactgttttgcctcatatggaatttgcttata

SEQ ID NO: 338 - DNA, 751 bp, Zea mays
  source (0)...(0): Zea mays BAC clone full insert sequence contig bacm.pk147.d02.fis15
caaacagggtcctttcggagaggtactcaggaaaatggcctgagtcccctaaagtatcacaagaacatcatcgggataacatcatcgtatcataaataatcacatcatgttcattgattaagttaaagcaatagaataagctaaccatgataacccaaaaggtaaccaaggataaggtaatgtaatgcgggacagtgaattataaagtaaagtaggatgtgataggtctgaggacacttgccttcaccaggttcttgctcagggagatcttcggcaacacactcaggaatcataggttgctcgttgtctaaataaagcgatcatacattcaatacatttggaaagtacaaatgaacagcacatcaaacatatacaaacattggaacacatctcaaaaggtatattattaattaaagaagaaggagaacaaattataacatgaactaatcttaattaggagttgattactcttaagtgttgtccatgattacataatctaatactattcattttattgagacctaaaggttaaaccagagattagttcattcatcacatattattatcttcacaatattaaacatccatttaccactagggtttcctttttatttatttcattaagtggataaatcaatacatacactaacctatagttagacacaaaactagagtgcgcagactgtgaatgaacataatttatttgaacagagaatattcctatgaacattttgcaatttgaatcactaaa

SEQ ID NO: 339 - DNA, 1326 bp, Zea mays
  source (0)...(0): Zea mays BAC clone full insert sequence contig bacm.pk147.d02.fis16
taattggaatgtgagaccacttggatttgatgaagggtccttgcaccccaacatgatgtactcttctttgtgcttccttcttctgcttcttgttggctggttcagaacttgaaccgcctgtgattgggagcaccagcttcgtggccgaaggtgctacatcttggttgttgtgcgaagccatcgtcacaactgtggaagtgagttcaccagaggtgggcgccaatgttggtccttgttctcgaatgttatacaccaagaacaaagcaacacaattgttaatggataaggaacttcgtccttcgagacattatctcccttgagacataatgatcctcggacaaaggtcatgaagggtgtaccttcatcttctcagtaaatgaatataaaagaagaaacatgtaatacataagaatgtaaataatggcaatgtagaaatagattatttacattcttatttcattttataaacatgaacaaatgctcataatatttaaatttcattgataccttcggctcaacagaaggcgagagtgtgagagacgcgggagcaattacaatgcagcgtgaacaatacatgggtattgttcatctatttttaggcacaagatgcagcctggacgaaattacatccatgtccctgataactaattatgatcataatacaaactatgagggactaaacagtcttttcctctctaagtcggtatcgtcctttgtctttatcatgacatcaagccgaagctcttttaatcgaagctttggctttgtccgcatcacctttggtttatatcttcatgtgacaccttcctttatatggtcttaccaaaggtgtttttgcctagaggaccttcggcggagaagaagacccccaacaggggaggtgcctgggataagctctatggcaaattcaattttcctttcaggtggcatgcctgataactcttcagggaacacgtcggggaattccgacacaattctaattgcctcaatcagattggactctttgtcatctactgataaatggtgacagcctccttcttctagttcaggcaagtacatcttagttactacttcctttccgaacagggacaccaacttaactgttctcttgtcacaactgacggtggcttagtttctgtgtagccagttcatcccttggatgacatctaaaccttgagttcccattactactaggttagcggggaagtctatcccccttattttcatccttagattcagacaaatcctatcggactgaacttttgccccaactgaaattactcttaaaggtgggatcattgggtcctatgggggatgttatttgct

SEQ ID NO: 340 - DNA, 619 bp, Zea mays
  source (0)...(0): Zea mays BAC clone full insert sequence contig bacm.pk147.d02.fis17
  misc_feature (0)...(0): n = A,T,C or G
gagaggtgctatatccttgcacataaacaatctttttagcctatctttaataggaaagtatcgcaaaactttgcaaggactagctttccttctttgtttctttattaaaaccgactcaggttgcatacccttccaccgtgaggccttacaggtagagcagaaaccatcatcttttttcccttccaaaatagttggcaattatttggacaagcatgaatgtcctcataccctaatccaaattttgaaataatttttttggcttcataaaaattcttggggagttgttgtccatttggaatagccatacgaagaatgtcaagaaggtcaccaaaagttttatccgtccatttgttcattgattttatattaaatagaagcaccaataaagtcagaattgtcaactcacatcctgtccatagcagcttattggattcctcaatcatcttataaaactttgctgcatccaaacaggaccctttcgtaggagcattgtcatcaaccataagtgtgtcatcatacatgtgttgtattgtatcatgaattatttgcgtcatattaacttgtctttcgttactacaactattttgacccatnataatattttcatgcccagaagtat

SEQ ID NO: 341 - DNA, 1479 bp, Zea mays
  source (0)...(0): Zea mays BAC clone full insert sequence contig bacm.pk147.d02.fis18
  misc_feature (1)...(1479): n = A,T,C or G
tgataatgacatgcaggtgacgaatgaaaagatggggcaanttggaggccacacagatcgacacgaacaccaaacttgcaaatgtggaaatgacagttgctcatattgacaagagccttgtcgcactcttgaggcggtttgatgagatgcatgctaatatcaatggtgggcgtgatgagggcgccgaaggtaactgggatgactatgttgctgatactgaacaagatgaccaagaagcacctaatcgccggcgactacgtactaaccgtagaggtatgggtggttttcaccgacgtgaggtacatggtaatgatgatgcttttagtaaggttaaatttaaaatacctccttttgatggtaaatatgaccctgatgcttacattacttgggagattgcggttgatcaaaagtttgcatgccatgaatttcctgagaatgcgcgggttagagctgctactagtgagtttactgaatttgcttctgtttggtggatagaacatggtaagaagaatcctaataacatgccacaaacttgggatgcgttgaaacgggtcatgcgggctagatttgttccttcttattatgcacgtgatatgttaaacaagttgcaacaattgagacagggtactaaaagtgtagaagaatattatcaggaattacaaatgggtatgctgcgttgtaacatagaggagggtgaggaatctgctatggctagatttttgggcgggttaaatagggaaattcaggacatccttgcttataaagattatgctaatgtaacccgattgtttcatcttgcttgcaaagctgaaagggaagtgcagggacgacgtgctagtgcaaggtctaatgtttctgcaggaaaatctacaccatggcaacagcgcacgactacatccatgaccggccgtacactagcaccaactccctcgccaagtcgaccagcacccccgccttcctccagcgacaaaccacgtgcatcttccacaaattcagcaaccaaatctgcccagaaacccgcagacgatggtgggtattcctctgctagtgatttggatgaagctacacttgctttgcttgcggctgatgatgtaggcactaaggaaccacccgaagaacagattggtgcagatgatgcagagcattatgagagcctcattgtacagcgtgtgcttagtgcacaaatggagaaggcagagcagaatcggcgacatacgttgtttcaaacaaagtgtgtcattaaggagcgttcatgtcgtttgatcattgatggaggtagctgcaacaacttggctagcagcgacatggtggagaagcttgcacttacgaccaaaccgcacccgcatccatatcacattcaatggctcaacaatagtggtaaggtcaaggtaaccaagctggtacgaattaattttgctattggttcatatcgtgatgttgttgactgtgatgttgtgcctatggatgcttgtaatattc

SEQ ID NO: 342 - DNA, 1518 bp, Zea mays
  source (0)...(0): Zea mays BAC clone full insert sequence contig bacm.pk147.d02.fis19
  misc_feature (1)...(1518): n = A,T,C or G
ccccctttttcccccggggggaagggggggccaaacccggccggggtttggccccccccccgggtgtggtccccgggatttttccgggccccttgtttccaaggggttttgggcccaggttttggggagtgcccccaaccaaaggcgttcccttgggttataacgggacacaatgggggagttccttctccagcccagggatttcggagggaactaggtcatgcttatgattgccactaccccatgcagaaaatgaggaagtccacgttgatcccatcgacgccgataggtatgagagtcttgttgtgcagcgtgttctcagcacacaggttgcccaggccgaaaaaaatcagcgacacactctattccataccaagggcgttgtgcacgaacggtcgattcgcatcatcatcgatagtggcagctgcaacaatttggcaagtacagcgttggtagagaaattatccttgcccactcgctcacacccacatccgtatcacatccaatggctcaatgatggtggtaaaataaaggtaacacgttcggtacgtgtccccttttcgctgggttcttattctgattatgctgattgcgatgttattcctatggaagcatgctctttgttattgggtcggccttggcaatatgatactgatagtttacatcatggtcgttcaaatcattattctttcatgtttaaaggccagaaaataattatacatccaatgacccctgaccaaattttgaaagatgaccttactagggctgctaaaactgcacaacaagtcaaatcaacatcagccgcacctattaaatctgaaatcaagttgcactctcctgttttacttgctactcgtgctgattttgatgatctccatgaagctcatatgccctgttatgcacttgtatgctcgcgcatgcttgttccgcttgatgatgcaccgtctttggatataccccctgctgttgttaaccttttgcaggagtatgttgatgtttttcctacggacttaccaccgggtcttcctcccctccgtggcattgagcatcagatcgatctcatccccggcgcttctcttccgaaccgcgccccgtaccgtacaaatccagatgagacgaaggagatccagcgccaggtgcagacgctgcttgataaaggttacattcgtgagtctcttagcccttgctcggttcctgttttactcgttccaaagaaagatgggtcatggcgtatgtgcgtagattgtcgtgctattaataacatcacagttcgttatcgatatcctattccacgccttgatgatatgttagatgagcttagtggtgccgttattttctctaaggttgatttgcgtagcggttaccatcagattagaatgaaactcggtgatgaatggaaaacggctttttaaacgaaatttnggttatatgaatgggtggttatgccatttggatttgactatgctcccagcacctttatgcgtttaatgaatgaagttctacgggccttcataggtt

SEQ ID NO: 343 - DNA, 704 bp, Zea mays
  source (0)...(0): Zea mays BAC clone full insert sequence contig bacm.pk147.d02.fis20
ctgagaatgtgcagcaatatcatggcatgaaaatttttgttcaacctctaactcccaatcaagatatgcagcaggatcatatttgccattaaaaggtggaattttaaatttaatcttagaaaataagtcattagggggatgacgaaccacacggcgtgcacgaccacggcgatctccatcttcccactcagtgtcaccgccgtagtcctgctccatctttgtggtcaacgcatcaaggcgtgccaggatggtgtcgagtgtggtgcgagtcgccgtttgggcaaggtcaagctggttgaaacgctcggtcgtcgaagtgaccgttgaatcaagccgttcatgcatcgtcctaatgtcatcagcaagtccatcaacttgtccccttacttccagcaactaggcatccaccgtgtcgtgtgctcccgccatagttagcgcaaacaccaaaacaccaaaagaagaaaaaaaacaacgacaaaaacaggggtgtactgctcacaaggcgctcacactagtgctattatcaaattcttatccgttcttaccaagccacagtggtgacctgcaaccaacaggtggaaccggtgaaagattggatgagcgattgcctggagaaacagaaaccttctcgtcgtagaaatatgtggagttttgggtaggctgcactctagtcaaggattagcacgaccaaacaataatgcaaa

SEQ ID NO: 344 - DNA, 942 bp, Zea mays
  source (0)...(0): Zea mays BAC clone full insert sequence contig bacm.pk147.d02.fis21
tcgtgtagctcctatcttgttgcttcttgtgctgagaaaaatatcaaaaaaatcatacaaaaaagaaaaacaaaatcacctgtgatttctactagtgcctttttggcatcactagtacaatatttacggtactgccattctgctagttccatccatcctttgcacctgtggccagcaatatagtttcgtgttttgcactataattcaactttgcattattgtttgatcgtgctaatccttgacttgagtgcagcctacccacaactccacatatttctacgacgagcaggtttctgtttctccacgcaatcgctcatccaatctttcaccggttccacctgttgattgcagttcaccactgtggcttggtaagaacggataagaacttgataacagcactagtgtgagtgtcttgtgagcagtacacccctgtttttgtcgttggtttttctccttttggtgttttggtgtttgcgctaactatggcaggagcacacgacatggtggatgcccagttgcaggaagtaaggggacaagttgatggacttgctgctgacattaggacgatgcatgaacggcttgattcaacgatcacttcgacgaccgagcgtttcaaccaacttgacctttctcaaacgacgactcgcaccacactcgacaccatcctggcacgccttgatgcattgaccataaagatggagcaggaatacggcggtgacactgagcaggacgatggagatcgccgtggtcgtgcacgtcgtgtggttcgtcatccccctaatgacttattttctaagattaaatttaaaattccatcttttaatggtaaatatgatcctgctgcacatcttgattgggaattagaggtagaacagaaattttcatgccatgatattcctgctaatagccaagtgaaggctgccattagtgaatttactgatt

SEQ ID NO: 345 - DNA, 686 bp, Zea mays
  source (0)...(0): Zea mays BAC clone full insert sequence contig bacm.pk147.d02.fis22
  misc_feature (1)...(686): n = A,T,C or G
tgccccatggtatcccattaatacaatggccgaaagcatctttaaaatcagcatcgtcaacatattgatccttcacagtgtccaaaccaaagattttaaaatctaattgtgacagcatggtatagcgacgagacaaagcatcagcaataacattgtccttcccgttcttgtgtttaataatgtaaggaaaggactcaatgaattcgacccatttagcatgacgacggttcagatttgtttgggtacgaatatgttttaaagcctcatgatcagaatgaattatgaactcacgatgccaaagatagtgctgccatgtatgcaaagtgcgcactaaagcgtaaagctccttatcataagtagaatatttcagactagcaccgcttaatttttcactaaaataagcaactggttttccttcttgtaacaaaacagcacctagcccaataccgctagcatcgcattcaagctcaaaaactttattaaaatcagtcaattgcaagaggggagcttgngttaacttatctttcanagtgctgaacgctacctcctgcgaatcactccaagcaaacggcacatctttctttgtaagctcatgtagaggcgctgcaatggagctaaatcacgaacaatctgcggtagaaacggcaagtccnagaagctccgattngtgtgnacgtcgtcggtgt

SEQ ID NO: 346 - DNA, 842 bp, Zea mays
  source (0)...(0): Zea mays BAC clone full insert sequence contig bacm.pk147.d02.fis23
cttattcgaaagccgaagatactgcactgtcagcagccttcggaggccgaaaaaagaagaggctgaatcgggtgtttgatgcaatcgggttcgtctaccctgactatcgttaccccattcgagggcagaagagaaaaaacacaacctctgcaaaagaagaagctgcaactgctcctagcgaggcagaaccgaaaagaaaaaggataaaggtcctcacacatcgaccgcgctttattgaaccagcttcggtgcccgagttcaccggaggaatttcttcggccaccgaggctgaaaagccaatcaaatcaaccttgctgccagaagttgcagaaatggccgaagcgccaacaaggatagaattgaaagaatcgaagattttgctaccagaaaccaaagagatggccgaagcgccatccatagaaaaaatggaagaagtgaaaaaaccaactgcagaaaaaatatcagaagttttgagtcctgcaacagatattgagacagtaaaaaaccaaaaagtgccagcagtgactccgaaaagaaagagaatggcaaatgtgctagatgtactggaaacaattaaatcttcaagcacacctccgaagcagactactgccattcccgaagcgaaaactgaaatttctgatactaaagctccagagcaagaaactgaagccgaagctgggtcctcagggcccgcgaagataaaatccttggaaactgaggaagaaaaaataacagagccaatttttgttgaagaaatcggtgtcattgcccccgaagcatcctccaaagtccgtgattatattgttcgtcatgcttcggggaaaaaactatcagaaaaagaa

SEQ ID NO: 347 - DNA, 469 bp, Zea mays
  source (0)...(0): Zea mays BAC clone full insert sequence contig bacm.pk147.d02.fis24
agcgctcaagacgaagcccataaagctgaaatcgaaaatttgaagaaaaaccttgcagaaatgaatgaaaattttgaagttacaaaggcgaaacaagaaataagtgagatggaaagatccagagtgcaaaagaatgttgaagagcttcgggatgccaaggagagatgctacgaaacatctatagaatgcgcgaagaaactgaaagatggctttgccaaggtaggagcatactcttcggaacaaaagtttattcgtgttgatcccaaaggagttatctagtggattggtgaagtagccaaagctttcgatgaaattcttgatgatcgtggagatttctgcgcgttcgccggtgcacgaggggtcgaggcaattttggaaaaaaccggctgtgaacatgttaaagccgtagcccaggcagaagctaacttcttagctgacgacaccaaagacccttcgaccgaagcctctt

SEQ ID NO: 348 - DNA, 993 bp, Zea mays
  source (0)...(0): Zea mays BAC clone full insert sequence contig bacm.pk147.d02.fis25
  misc_feature (1)...(993): n = A,T,C or G
gccgcgaacactactatacgggagtgggattattccatcggaggcgaggatcgatatcctgaatgtaatttgtgtgggttgtgtcccgcgcctataaataggtgaacagtacccccgtactggagacgctgacttggcattcgctttttgcgtcacgcttgtattgtcatctctttccgattgaaggtacacttgtaattcaacgatatttctgtttatgcctgataataatatataattgttcatgttgtcttttatattctttacatttcatccttcgtcattgtttaatgaatttatgaaggtacgtcctacataaccttcgtccgtaaaccattatatcctaagagaaataatgtttcggaggacgaaggactttaacgattaacattctctatgttgccttgttcttaactcatagcacttgagaacaagtccccaacattggcgcccacctccggtgaactcacttccactctttgaagttttttgaacaccttcggcgatcataaatcttcgttatggcgccgaagaaagcttcagcgactggggctgcagttctgcaaccactggaccacaatcaggagacagtttccctgcgggaggcccgaagccagaaaaggaaggctgtcagtccgacaccaccagaggacgagatagatcaagaaatcagagatatggagatgcttcatcaacaagtacagaggaagaaagaaaagatggccaggctagctgaactgcagaggcagatagacgaagcctctgaagaagttcgtcatcttgctcaggatgagcaacaccgaaggcctcagcaccaagaccttcatcaggagggttttcccaacgaagatgactggtatgacaatttccatcatgggaattttgtttttgatgatgcttctcctttgtccgctgagctgcaggctacaccttgggcctccgtcctacaagccgcctcagcttcncgtattcgatggccactcagaccgaagc

SEQ ID NO: 349 - DNA, 1004 bp, Zea mays
  source (0)...(0): Zea mays BAC clone full insert sequence contig bacm.pk147.d02.fis26
ctctcaagcgcgttaacacgatccgtaaatgttgggcatgctcctcttcattcttggaatatattaaaatatcgtctatgaagaccaccacaaacttgtccaactcgggcatgaataccgagttcatcaaatacgtgaagtgggcaggagcatttgtcaatccgaaagacattaccaggtattcaaataatccataccgcatagtgaatgcggtctttggtatatcctcgggccgaatacagatctgatgatagcccgatctgagatcaatcttggagaataccctcgctccagtcagttgatcaaatagaatgtcaatccgtggaagagggtacttgttttttatagtgacctcattcaggggtcgataatccacacacatccgtaaagtttgatccttcttcttgacgaatatggctagacaaccccatggcgacgagcttggccggatgaatcctttctcaagtagatcttgtaattgaatcttcagttctgccaactcatttggaggcattcggtacgatcttctagatacgggagtcgtatcgggctgcaactcgattacaaactctacctccctttcaggtggcagtccaggcaaatcctctggaaagacatcgggaaactcgcatactaccggaatatccttgatctccggtataatggcttcataaactctgccagtagctttggttggaatggggataggcaaaagaatttcttcttggttatgactcaacctgatagttctctaatcagtgttgagggttgctttgtgtcgggccaaccaattcatgcccaaaatgacatctatgtcttggcctttcagaacaatcatattagtaggaaagtcccgtccggccaatgttacgggcacttgataggccacttctctagtaaatatttgtcccccgggtgagtgaattttaaacccttcttttgattcatggcatgaaatgcaatgttgctccacaaatttcttgctgatgaatgtatgcgaagcc

SEQ ID NO: 350 - DNA, 1039 bp, Zea mays
  source (0)...(0): Zea mays BAC clone full insert sequence contig bacm.pk147.d02.fis27
tcattacttggacccaattaaaaactgccatgcgccacagatttgttccttcctattatgctcgtgatttgcttaacaaaatgcagcgttttcaacaaggttcacagtctgttgaggattattaccaggagttacaaaagggtatgcttcgttgtggtttagttgagtcagatgacgctgctatggcgcgttttcgtggtggtttaaacagggaaattcaggatatacttgattataaggattattttgatataaccacattgtttgaatatgcttgcaaagctgaacgtgaagtgcagggacgacgatcaaagacatatactaactcttttgcaggccggggtccaacacacagctcaactccttccagccctgcacctcctacgcctagcactacatcgcgcacagggccggccaagccagtggcgccccctgccaaaggcgccgcttcttccacaggacgtacacgggatattcagtgccatcgttgcagagggtttgggcacatgattcgggactgcccaaacaagcgtaccttgcttatacgtgacaatggtgagtactcttcagccagtgattctgaggaaactagtcatgctatgattgccactaaccatgcagaaaatgaggaagtccacgttgatcccatcgacgccgataggtatgagagccttgttgtgcagcgtgttctcagcacacaggttgctcaggccgaaaaaaatcagcgacacactctattccataccaagggcgtcgtgcacgaacggtcgattcgcatcatcatcgatagtggcagctgcaacaatttggcaagtacagcgttggtagagaaattatccttgcccactcgcacacatccacatccgtatcacattcaatggcttaatgatggtggtaaaataatggtaacacgttcggtacgtgtccccttttcgctgggttcttattctgattatgctgattgcgatgttattcctatggaagcatgctctttgttattaggtcgaccttggcaatatgatactgatagtttacatca

SEQ ID NO: 351 - DNA, 1253 bp, Zea mays
  stem_loop (0)...(0): Zea mays BAC clone full insert sequence contig bacm.pk147.d02.fis28
  misc_feature (1)...(1253): n = A,T,C or G
ttcaagctcgctcgagtcgacggatattcaaaaagaggggtttgacacgccacaaaccgagtcaacattgttttccttgtttttctccttcggttacgtcaaaaaaaaacagaaaaaacaaaccgagtcaacggccgtttccttgattttctccttcggttacgaaaaaaaaacagaaaaaaaaacaaaccgagtcaacgaccgctttcttgtttttctccttcggttactaaaaaaaacagaaacaaaaaaaagaaaacgaaggagaaaggatacggttgtttcattccggtcgtttttaaaacataacttgaggtaccttccgtaaaacgggcataacttttcgctcgggtgtccaaaaaatctgaaatttttacaggagcttgttgacaccattctgaggccggccaaactcaccttcggtctgtttggtttcgacaaaattgtcaaaaaaaattcaggaaaataaagaaaaaattcgtcaaagttctcgcacgcttttcagagaacttcctgattttctgtagaccacatctgatttctgctttaggtgaaacttcgtgtagctcctattttgttgtttcttgtgctgagaaaaatatcaaaaaatcatacaaaaaaagaaaaacaaaatcacttgtgattcctactagtggcctcgctagtacaatatttacggtactgccattctgctagttccatccgtcatttgcacttgtggccagcaatatagtttcgtgttttgcactataattcaactttgcattattgtttgatcgtgctaatccttgacttgagtgcagcctacccaaaactccacatatttctacgacgagaaggtttctgtttctccaggcaatcgctaatccaatctttcaccggttccacctgttggttgcagttcaccgctgtggcttggtaagaacggataagaacttgataacagcactagtgtgagcgccttgtgagcagtacacccctgtttttgtagttggtttttctccttttggtgttttggtgtttgcgctaactatggcaggagcacacgacatggtggatgcccagttgcaggaagtcaggggacaagttgatggacttgctgctgacattagaacgatgcatgaacggcttgattcaacggtcacttcgacgaccgagcgtttcaaccagcttgaccttgctcnaatggcgactcgcnacacactcgacaccatcctggcacgccttgatgcattgaccacaaagatggagca

SEQ ID NO: 352 - DNA, 1470 bp, Zea mays
  source (0)...(0): Zea mays BAC clone full insert sequence contig bacm.pk147.d02.fis29
taggtcgtccactatgggccacagttgggctggtcgtctattcttctgggccctcattcttcagtagcatgacgaagttaagatctctggcacgggcccgagtgattggcccagctaatgaaggaagtggcgcttgatgtggaggtgctgctggtgtagtcgtactcatagtgatgtcctcatcacccttgagagtcttttctttagtcgggtaagacttgctgagtaattccatactcagggtttattcccccgttgtttttaggtgaggaagcaataaacttttgttgcttttgctccaaggtggttccaaatgaagaaaaacaagagtgaagctacgggaggacatggtcctccataaaaacttttatgtaaaaactatcgggaggagtttttgcctcccttggtattgtaataatactactcagcactcgttttataactctggtctgtaataaataacttgatctgactttctaaataaatgtaagtttatgtaattgcttccgcattcttgtaactccgatgcttgtaatgtctgcgtgacgggtaaaacgctcttgggaaaggtgagaaaagcagataccgaacttgtcaagtgattcaggggcacctacagggttgtctgaggtccgttggacaaggacaactgtaggtgggcctagttaattgggaggttccgtcacaggttctggttgcgaaaactcgtgctttgtatccaccctgacacccgttttcggaatgggtgacgtgcggcaacgaaattgcgcgaaaccaacccaaacatgagttttggacctaaagtagtgggttgggcatgttcgttgcgaaaaacgaagaaatggttccggtggcaaaaactcatgctttgtatgcacccgacacccgttttcggaatgggtgacgtgcggcaacaaaattgcgcgaaaccacccaaacatgagttttggacctaaagtagtggattgggcatgttcgttgcaaaaaacgacgaaattgttctggtggcaaaaactcgtgctttgtgatacacccagcccaggttgggttggccgaggcccaactaattagggttgcccggagcccaacagttcattaagcacacccaactcaaggaaaggcccaatcgccccaaaagactagtccaatgggggaagggtggctctcccttttaaagtggcttcctcctcccaagttaagcgaggtgggataattctgaggctcacacggttgccgtccgactacaattgggccaactggaccaattgcgtctttgccaacgggtaatagtggaggatgtcctcatcatttctaccttcttaaaatggatcctagctctgataccagatgatacacccagcccaggttgggttggccgaggcccaactaattagggttgcccggagcccaacagttcattaagcacacccaactcaaggaaaggcccaatcgccccaaaagactagtcca

SEQ ID NO: 353 - DNA, 986 bp, Zea mays
  source (0)...(0): Zea mays BAC clone full insert sequence contig bacm.pk147.d02.fis30
gtggcagcattatctttggcatcgtgagttcataattcattctgatcatgaggctttaaaacatattcgtacccaaacaaatctgaaccgtcgtcatgctaaatgggtcgaattcattgagtcctttccttacattattaaacacaagaacgggaaggacaatgttattgctgatgctttgtctcgtcgctataccatgctgtcacagttagattttaaaatctttggtttggacactgtgaaggatcaatatgttgacgatgctgattttaaagatgctttcggccattgtattaatgggaaaccatggggcaaatttcacatacaggatgggttcctgtttcgcgctaacaagctgtgtgttccagctagctcggttcgtcttttgttgttacaggaagcgcatggaggcggtctcatggggcattttggcgtctacaagacacatgaggtgttggctgcccacttcttttggcctcggatgcgcgctgatgtggagcgccttgttgcacgctgcactacttgtcagaaagctaagtcacggttgaacaaccatggtttgtatatgcctttgcctgtcccttcttctccttggcttgatatctctatggactttgttttgggcttgcctagaactaagaaggggagggatagtatttttgtggttgttgatagattctctaaaatggctcactttataccttgtcataaaactgatgatgctagcattgttgctgaattgttctttagagaaattattcgtttacatggtattccaaaaacaatagtctctgatcgcgatgctaagtttctaagccatttttggagatctctttggaataaattgggaactaaattgttgtttagcactatttgtcaccctcagactgatggacaaactgaggtagtaaatagaactttatctaccatgcttagggctgttttagacaagaatttgagacgttgggaggattgcttgcctcatg

SEQ ID NO: 354 - DNA, 1151 bp, Zea mays
  source (0)...(0): Zea mays BAC clone full insert sequence contig bacm.pk147.d02.fis31
cggctggtctggtcgttccctcatgcgagctggccgtagcccgggtgtacggtcgggtcccaagttctcgggctggtatgttgacgctgtcaacggtttggccggagccgggtttgcgagagcagcccccgagcctctgcacagggcgagaggggcgatcagggacaaactcgacttttttacatacgcccctgcgtcgccttttcgcaaggaggagggggggaaagcgccatgttgccctcgatgggcgtcgaacatggtgtctccggtgagctgcaacgggtaatccgagtggacgtccgtgccccattcgttaggggtcagctagaggcccggaggcgcgcccaaaagtacctgcgggtgatctgccggacccggtcccctggcgacggggtccgagggctcgatgcctccctccgatgggattccgttacaagatcgttcccgctggtctcggaaatgtcctagggtacctcgggagcgcagcccgagccttggttatgtatcgaacgtacccatggtcatccctcgctctgtgtctgaggcggctgtgaacccttcgggggccagccttcgaacccttgatcagtagtgggcgcggagcccgagtagcctaaggcggtcgttgaacccttccgaggggccggccttcgaacctctgaccagtagtgggtgtagagcccacgcgatctgaggcggctgtcgaacccttccgaggggccagccttcgaacctccgatcagtagagaggctcggagcctggttccttcacggggaaggatccttttcggggtatccccctttcccggtccctgttgcaagagagagaaagaggaaaaaaagggaaaggatacgaaatcgaacgacgtagcgtaccttttccgacgcggtcattatggcgaaggcgaagcgtcgctcgcttctcctgccataggcgccgcctgtcccaccgcggagttaatgtgacggggcgcgcggttcgcggggcggccgttgcgcgtgcgcgagccattcgaggaacggctgtttcgcttcgtgtttttgaatcccgcggtcggtcccgggcggaacgttgaacgggtctcgctttggtctttatatactcgagggaaggcctggcgatggttctttggctccgcttcctgcctccc

SEQ ID NO: 355 - DNA, 2135 bp, Zea mays
  source (0)...(0): Zea mays BAC clone full insert sequence contig bacm.pk147.d02.fis32
ttgtacagggaagcgcatggaggcggtctcatggggcattttggcgtctacaagacacatgaggtgttggctgcccacttcttttggcttcggatgcgcgctgatgtggagcgccttgttgcacgctgcactacttgtcagaaagctaagtcacggttgaacaaccatggtttgtatatgcctttgcctgtcccttcttctccttggcttgatatctctatggactttgttttgggcttgcctagaactaagaaggggagggatagtatttttgtggttgttgatagattctctaaaatggctcattttataccttgtcataaaactgatgatgctagcattgttgctgaattgttctttagagaaattattcgtttacatggtattccaaaaacaatagtctctgatcgcgatgctaagtttctaagccatttttggagatctctttggaataaattgggaactaaattgttgtttagcactacttgtcaccctcagactgatggacaaactgaggtagtaaatagaactttatctaccatgcttagggctgttttagacaagaatttgagacgttgggaggattgcttgcctcatgttgaatttgcttacaatcatgccacgcattcttctacaaagatgtgccctttccagattgtttatggttacattcctagggcacctattgatttgatttcacttaatgctgcgaacgccccacatgtagatgcttctgcacatgttgaacaaatgattaccatacatgaacaaacgaaacagaacattgctgctactaatacaaaaaatcaggttgctggtagtaaaggaagaaaacatgttacttttgaacctggtgatatggtttggttgcatttgagaaaggatcgttttcctactttgcgccgttctaaattgatgcctcgtgctgctggtccttttaagatactaaccaagattaatgataatgcttataccctcgacctacctgcggagtttggtgtttccactagttttaatgttgcagatttgaaaccgtatgcgggagaagatgaggagttgtcgtcgaggacgacttcagttcaagaaggggaggatgatgcggacatcaacaccaacacgagcacatctacaccagcagcaccttctccagcccaggcgccaccccttccacctgggccagtgactcgggcccgtgcaagagaattgaactacatcatgttgttaaagaacgaaggcccggaagaatagacgaccagcccaattgcggcccataatggacgacctagggttggccgcccctaggggttgcgccccctctctatttattcaggagctgcgcctcctttatttcctgagttttgttttacgttagccttagctactctcgaacacgcgcaaatctgcgctgtcttcgtgtattcagaactccaccctcgagtaatagattagattgctcgcatcttgttcttgttcgttcttcgattgcgcacaggaaacgatcttcgtgatcaggccgatctcgcatcagcaaggtcggtaaccacagggagttggttcagcgattgcattggcgcctcgggcttgctcgtcgtagtcggatcgcaagggtcatcttccgccaaatcggaattatctctactcgccgaaagatcgggcacctcagcttcatcaccagccaggtactgtaccatgggagagctcattcagtgcacctgacaaccaagttctagggcagtttttctcgaaaattttcatggtaacctacccaaacctctgcaagaaagctgtagagctacaaactagctacaactttgtcatagcaaccttggttaaattcttaataaatcaagcttgaattcatgctcaaagtctcagtggttgcactgtctgtctgaatttcagcccttatcagcctgacaatccaacttcagtattaattatctctaaattattctcaacaactatgcttacactcttaagcaaagttgttctcctttgtttggtctacaactttgatgtggttccctagggcaaaaaccctagaacttgaaacatacaaagctcaaaagttgagcccataactctgaaattcagacttaggctatatagggcttaagaggtgatttttgcaaata

SEQ ID NO: 356 - DNA, 2599 bp, Zea mays
  source (0)...(0): Zea mays BAC clone full insert sequence contig bacm.pk147.d02.fis33
gagagagatgctataacaaatctatagagtgtgttaagaagttaaaaactagcttcgccagggtcggcgccttctcaagcgaagaaaactttacgagggggaatcccgaaggtcccatcgaatggatcgaccacgaagctgaggccttcgaagaaattttaaacaaccgtggagatatatgtgccttctctggtgccagaggaattgccaccatcttagagaagaagggatgtgaacatgtaaaaattttagcacaatccgaatctgctttgtcttttgaagatgcaagagatccttcggcagaagctagtataattggtggaaaattttttaccgatatctgggataatggtggccgagaaatggccggagaaattattcgaagaagtgaaaagggcattcacgatgctagagaagtagctgaggctgctgaaaaaagcgcagaggccgaaggtcaattaggtattaactaatagtttttattgtgttgtaatcttaggctttaagatttgtttgcgatttgtaatagcaatgtagccgtatcctgtcttacttcagatcctgctaaagcgtcttcgggccctcagccgaaaggagacgacgaaattaaaaagatggctgaggatattatggatgaagtcgttaatcggctcctgaacgaggctgcagaagtcgttttgagagaagattaagtatttttgtaaaaacttctgaaatgtaatatactgtaacattttgtaaccccaaatgtaatatacctatttttgttagtcaattctttacgacgcatgaaactttacacgtaccgcttttgagtctttgacgaaaaaacaccttcccttcttttcatgcttcgtgaagaagaatttttctttgtcacaacaatatccaatgttctgatgattaatatccaggcttcgtgaagatattttccgaagctacacttccgaagaccaatgatgtatctttttgtgaccttgatttctccctttttttcaaagcgttcttctgtagattaataatgtgtccatctcttgtgccatgtgcaaaatgatgtatgatgcttatgccatgcgaaatgatgcgatgatgttatgttatgtgagatgacgtttattccgaagatacatacgcatccctgcaataaaacacaatcttttataagcctcccttaggagcttcttcgccttttacttcagcggaatcagcgtttatttttcgctgtaagcctcccttaggagcttcttcgccttttactttcagcggtattcgcattgacttttcgcgcttcgccttttacttaggcggtatcagcgttgacttttcgctgtatgctctgcattccctttggaacgactttggagcagaaaacttacactgcgctccctttggaacgactttttgtgacttcggcaaacttactctgcgttccttagaacaactttttgttgcttcgaagaattttcgatagttcgaaggtcctttttattatcacaggtctttgaacttcaatcaatttaagcctgtgaagaaaacatatttttcttgtaggaatcaacgaaactaattacatgaaacctaaataatgtcctttattacagaaaataaaactgaacgaaaaagattgctattaaggtaggatattcgtcaatagatgtgctttgactctggcacagtgctattgactgtacgagcttcggactgctctctgaagtccctctggtgtggagcatactggctcccttctggctgctggccttgttgcaacggaggtggaggcggaggctgttgccaggaagcttgaggctgactcgccgaagcaacagaaactgcaggatgattgcccacatattctgggatgtagggcgaatgatacgaagctgtatgcatgacctgcttcggctgagcttgttgtgctgcggcttcagctatttccttttgcttctgaatagtaacatggcacatcctggtagtatggcctttgttctctccgcagaataagcaaaagattcttctcggttgatcgccaaatcttcctccaaagcccctggcgactctgcctcttggagctggtggtcggaaggagctttgctgttgccccgaagcctgtgaggagctttgtggcctttgctgttggcttcctctatcatcattttgtgtagagttatgaattgatctcacgtgcctcgggtagaacctccctccgaagcccctggtcatttcagaaaacctgaaagcctcctcccttctttggcgaaaatcattatcggcccgaatgtactcgtccatcttctggagcagcttctccaaagtttgaggaggcttcctggcgaagtactgagctgacggtcctggccgaagccccttgatcatggcctcgatgacaatttcattgggcaccgttggtgcctgtgccctcaaacgcaagaaccttcggacatacgcctgaaggtattcttcgtgatcctgggtgcactggaacagagcctgagcagtgaccggcttcgtctgaaatccttgaaagatagtcaacaacaagtccttcagcttctgccatgaagtgatcgttcctggtcgaagggaggaataccaggtttga

SEQ ID NO: 357 - DNA, 1690 bp, Zea mays
  source (0)...(0): Zea mays BAC clone full insert sequence contig bacm.pk147.d02.fis34
gcgctaggatttgaatggtggaagaacacaatgcaaccagcaacaaggaaacgcgaaagcacacaaattcaacaatgcagattattgaaagaaagtgcgaggctcaaaagggtgctgggataagatctaacctgaatttttatgtggttttgtggactgtaggaaaaaaacgctcgataaactcaccgatcaacctggagctctgataccaattgatgtagctgaggtgcccgatctttcggcgagtagagataattccgatttggcggaagatgacccttgcgatccgactacgacgagcaagcccgaggcgccaatgcaatcgctgaaccaactccctgtggttaccgaccttgctgatgcgagatcggcctgatcacgaagatcgtttcctgtgcgcaatcgaagaacgaacaagaacaagatgcgagcaatctaatctattactcgagggtggagttctgaatacacgaagacaacgcagatttgcgcgtgttcgagagtagctaaggctaacgtaaaacaaaactcgagaataaaggaggcgcagctcctggataaatagagggggcgcagcccctaggggcggccaaccctaggtcgtccactatgggccgcagttgggctggtcgtctattcttctgggccctcattctttagtagcatgacgaagttaagatctctggcacgggcccgagtgattggcccagctaatgaaggaagtggcgcttgatgtggaggtgctgctggtgtagtcgtactcatagtgatgtcctcatcagcatgtcatattgtttccaaatgttgttgccacagatgccttccaggactcgcgcacaggacggagccagtacctcccatgggagggaggccacgccgaatccacctccagtccctcccacacttgccgaggctatcgccgccttggtaaacgcgaccgtggataatactcgttttctgagcgagatggcgggtcaacagtttcaacaacaaggcgggcggggttatcaacagggtccccgtgaaacctcttacttgagttctccgagacacgtccactgttgttcgtaaaggcggaagaccccttagaagcgaacgaatgggtccgtgtcatcgagcagaagtttgggcttattcggtgttccgaaatccagaagcccctatttgcggcacagcaattgcgtggacctgccagcacctggtggggaaattttgttgccgtacaaccagctggtcatcaaataacctgggatgagttcaagttagccttcagagaacattatgtgcctaagggagtcctccatctgaagcaggaggaatttatgaagctgaaacaaggaggggatactgttaatcagtatctcaataaattcaatcatttatcccagtacgcaatcgatcaagtgaacaccgatttgaaaaagaagaattgttttatgagaggtttaaatgatcgattgcaaagaaagatggcaacctgcatagatcttacttatggaagagctgtcagtacagcattggcagtagaagcaaagtatgcaggcgccggaaaatccaagggttttggaggtgacaggcctagtcagggcccggtgaaaaggcaacggtttgttatccggccttccaaccagaatcgttgtttctctcgtccaccctccttccttttaagcagccagtatttattcgtccc

SEQ ID NO: 358 - DNA, 1668 bp, Zea mays
  source (0)...(0): Zea mays BAC clone full insert sequence contig bacm.pk147.d02.fis35
cgtgctgaattgatgttaaaactgcacgaaactactaaagaaaacatagagcgtatgaatgctagatataagtttgctagtgataaaggtagaaaggaaataaattttgaacctggagatttagtttggttgcatttgagaaaggaaaggtttcctgaattacgaaaatctaaattgttgcctcgagccgatggaccgtttaaagtgctagagaaaattaacgacaatgcatataggctagatctgcctgcagactttggggttagccccacatttaacattgcagatttaaagccctacttgggagaggaagttgagcttgagtcgaggacgactcaaatgcaagaaggggagaatgatgaagacatccacactactgatgcatctataccaatacaagtaccaatttctggtcccattactcgcgctcgtgctcgtcaactcaaccatcaggtgattacactcttgagttcatgtccatcatatttagaccatggagacccgtgcactcttgttttgcttaggaatcagggagaagaccgaaagggaaaaggatttgaacatgctggattcggactgcagaagaacaccaacttgtgacggtcaccacggtcagatgcgggctcggattggaatgttcaagcacaacatggaaagcttatcaagtctactttcatatggatccggaattatagtcatatctgttctgaggccgccgtaatcattgttttcttaccgagacatttcctgccttttctgcccatggtgctgcgtcaccctattttggcccaatgggtcgtgtatcaagttaggtccattagggacgcatcctagggttgcagcacgaccccaatacccttgtggtcgtcctcccatgtttataaaccccctagccgccaccaagaacagcgggttttgtttagatcaagtttagctctcgctacttgcttgcaagcgcgcgtgctagttcagccgcccgtcttcttgtcttcggaaccccaccatattgtagtttgatctttaaacctacatttagatctggtaattcagtacttgttctacttgttcttgctagttcttcgattgcttgcaggacgagtgccctagtggccagggtgtcacgctccacaagatcgtgacagccataggaggtggtgtatcggttgctaaggcgcagcgtctttggaaggctgtagtcgggccgtgaacgtcgtctcctcccccaatcgagttattccacaccctctcatcgaaagatcgggcaatcacccaacgggtgcacatcagttggtaatcagagcaaggtttatcggtgagagatttacttttcttcgctgttttcttatctcctatagtccagaaaaagccaaaaaatagtagattagttttaccgcaatcctataaaccattgagcatttactagtactacttagttagggcttgttgagtttttggttgcatcggttgtgtcgagttgctggtcttagtttattcctttagagttttgagttctaccacgttttggtcaccacgaaatccaccatcaccaaaaacatctctggttcgtttttgccaccacggatacatatcatatccgatttggaagtttaaatacaatctggaaagcttatcttatcttctttccaacggatctgaccttatctcaaa

SEQ ID NO: 359 - DNA, 2580 bp, Zea mays
  source (0)...(0): Zea mays BAC clone full insert sequence contig bacm.pk147.d02.fis36
ctttgtaataaacctggcgctcccatgttgcggcactttttgtaatgcaactattgattttaaatatgtatattttgcttatttgccatgtgtgtgtggatgattcctgaaatatcaaatgtgcattgttcagcttgttgtaatcttaacctcaaaataaaatattcaaatattttttattggtttattgcttgcaacggataaaaatgttgctacaactcgaaactaaacgttgtagcatcctatgataacgagctggtcttgggtggcaccaacacatgtaagtgttgttgtatcttataaaaatatgttgcagtttaccaacgcttatttatatgacttaccaacgtatgtacaagcgttgcagtagcccctagcaacgacagtataggcaacacataattatgcgttggtatagaccctagcaacgcttatataggcttgtaccaacacatatatgcattgctaaagggggtgccattttgtagtgaaacactctcaagtcacgaaccatgcgagacgtaaagaagtcttcgccggccgcgcgggggataggaacgttcttaggccatcgaccctcggtaacctccagcatccgcgccgaagactcccggagctcgggcgaagacatccatccccaggggccacgcatgtccccatcaattccatagcaaaactatcggagacccccagttctcccatcgcagtacctagcttcctcttcttagtggatgggacggcctccggcgcggggtcgtcttcagtctcagccaccggttttttcccgcggcggtcgacaacgtcttgcccgggataaccgccatacggcaaacaattcaactcgaagaccctattcaggcggtcgttagatccacgtatatcccaactccgctgggcctccgtctttggcacgtagcgaccaacaattcgcaccaccccatcctccgcctcacgcacgaatgcggcgggatctcgaccatgcaaatccagtgcgaaggcgggactccacactagcatcccgccacgggaaggcatctggcgagggcatacttcgctcagcgcccagccacgcgccaagggccataccccatacccgacaaactcctcaaccagattgcgtccgctactcatgcgggccgcgcgccgaaaggccccttcgtctccatcctcctccgctacctcaaactgcgggtacgctgagtaataatgcgaacacatgacggccatggggagcccaggatggtcttcgactgtgccttcggcaacgtagaaccaaaattcccaccagttgtcccatttattgcgggcgcagggaaccaactcaacgacttccatcgaagtcttgccggtcttcggcgtaaatgtgcaagatccaaattgagcaatcttatttctgattttccttttctgccaatgcagacaataatacttcgcgaagacttcgaccgagggctgcacgccatacgaagtcgttgccgagacatattttgccagggccaccacggcattcggcgtcagctggtggacctgaacgtcgaatttacgcagaacttctcccataaatcgatgcgcgggcagacgaaggccagcggcgaaaaaagcctcgaagacgaccaactcgccttccggctcggggacctcctctgccctcgggacacgggccactccgtcgccaaaatacccaagctgctgcatgtcttgcacacggaccaaggacatccgcgacacgccgaattccactgtgtcgccggtgcgcaactcctccgccgccacattgctcagcgtctcctcggacgacgccccggtcgacggtgtatcggcagcagaagaggaagaggacggcatggctacgtaccgtcgtcggcggcaggcggtttgcttcacacgggccagatctccgacgagcaagagcaaggagggcagacgagcagcgagcggtttgagaaggaagttagggttttcacggagcgtggaaagataaagttcaaaacgcgctgcccccgcccccttttatacacagggcgtggcgcttcgagaaacccgcaatccaacagtacgacgtcaatcaacggtcatgtcaaaaacccccgcggaaccacttcgagcgagggcagcgtctccaccatctagcgacgtcttcggcaccagatgacttagtcgaactggtccctcggagggcaaatgttggggcgaaggcgaagacgccacccttcgctcgatgccttcgccaacctcgctgcactcacggagacaagacgactggcagacttaccctttgtcccacgcgttgccggacgaagacctgtgatgaggtcgtctcatctcgcggcctcgtccaacatgcaggcccacgtgtgatctggcccattataacaggccctgcgtggccgctgcgcattacgggcctaatttgtaaaggtccccctgtaattacagtctgtaaccatgctttatgggaatattccggggataatctaggcgcctgagggcacatgcgtccttaactcatgacgctgggcactcagatacctataaatacccctgcacagtgcccttgagaggctagattaagagagcttt

SEQ ID NO: 360 - DNA, 3591 bp, Zea mays
  source (0)...(0): Zea mays BAC clone full insert sequence contig bacm.pk147.d02.fis37
ccgctaacactcactatggggattgggataattacaccgcgaggcgacggatcgtatccttagattagcagctaaagcacgaaaaacagcatttgaggctgctaaaaaggaagcagcagaaaaggaagcagcagaaaaggaggctgctaaattgagagatgcaacagcttctcaacctagtccgaattcccagaataatactgaaggtactcgtagtttacttatttgcaaacttaatatttgtagttctgtgtactgctgttctgaagttcttgtactgattttcataatagatgatttcctttgtaccatatccaatctcatccatgctgaaatcatttgaaaagaatcagtatcactttgtgcttttcatgaaaaaggcttagtatcttttgggttggcacttaattacagaaactttattatgtaattaagcaacatagatggcctgttttgcagatgttggcgtgttgaattggcatttggaccctaagaagtctgaaagcgaggaggaactagcaaaaatccgcagagacagaggatacagttacatggtttgcactacctagtctcccatgaattccaatagctttctgaacctcttatgctgtattctttacatcttgtatatgatatcattacctaaatgtgagttatttctgaaggatcttattgagatatgtcccgacaaactggaaaactatgaggagaaggtgaggaacttcttccgtgagcacatgcacgctgacgaagagatccgctattgcttggagggcagcgggtactttgacgtccgcgacaaagatgacaagtggattcgaattcggataagggaaggagacatgatcatcgtaccagctggaatttatcatcggttcaccctcgacagcgctaaatacacgaaggtaccaacatgatcttaggatcataggagcttcgaatttgatcaactggtgatctctgttgcacaatcatgaatacaactcatgaaatctgtttcatgaactgaggcatgaagacatgattggcattttgtagtggtagcaaaaaaatatatggtactgactccctgaaggccaaataagttcagttggtagaaataattgcagatcaagtgtgtactgtatgtggcaattatgtttttgttttaaattaagaaatttgataggctgtattttttccaaaacattacaaagatcagctattttaattacattccttaattttaagttatgttgtttttacatgtgcagctcatgaggcttttcattggggaaccagtctggaccccattaaaccgccctcaggaggaccacccggcgaggcaagagtatgtcaagaatgtgagtgcgggcactgtatttgctcttgcagctcacttcctggccaacacgaacctaccctccaagcccttctagagaatgtgcaacaaagctccactcctggctggataaacagttattagacctgttgtacctgcgttcttggaaggtgtaatgttgtgtgtggaatgttgtgtgtggaatcagtattagtactagagaaatatatatagggctgcaaatgttgtgtgtggagtcgaactttcatgtttttttttcagactcgctctctgtggtgtgtgcatgtctgtgcgaggtggagtcagatgtgcatgtgtttatacattacagtatgaatcagagcttgtgttgttgccagcaaatataatttccacttgtgttgttgccagcaaatagaaagaagaaatatagcaggtaatattgaatacttgtatgttctgaatactaatgctagcagctaccagtatgtctggagtggactcgcaaataacataactagcagttcaagctagcgacctagaacagaaggaaccagatctacgaaggtttgcatgtgaagtttcaaaaaaaggttatgttgtttgcaagttttcgagggatatatatgttcaaaagttctgcagccaaaagtattaataaaagtattgttatgttaagttcaaagatgacatactttattatcgtaaaatcagtattagtacattcattccagcacacctacctgcgactacatttcaacggggaaagcaacagaacaagacgaggggaaaggaagtccgatccatttcaaacaaaccgacttgagctcttcaccgtaacacaaggggcatatttgtccacacgcgagatcactgcgacccattacctgtagatagctgtgtatgccgggttaagacgagaacaataccaaaactacaaaagatagattgttataataacaggaatctaattggcaccttcgggataccacttttacgaagccgcgagatcgggatacctgagatccaaaatactcgatgatgggggattgaaacgcaagaaactctaacagccgtaatgcgaagcttccaggagtagcggatgcgtacgccagctgcaggtggagagacgcgtttacgcctaccgttgctatatgatcggacgatgaatattaaataagatgacgtggacaacgtgatagagcccgttttaaacccgctttcatatatagacgatttgtgccgggcagggcaggggtacaggaattggagttccacccaagcgctagaggatgtcgtggagttcacgggtgtcgttgacggggtcgaggacatggacaacagggatgacagtaggtcgaacatctcccaccacggcagggggtggactacggccttgtgagtctacgagagagaaggggatgggggtgcagtacgaggcggcgacgatgtgaggatgggagagagaacatagaaggattgacggaggattcggaacaagcgatcagatggacgaccatggtcttttgggagaatcaatttaaaaacattataaaatttattatatttgtaaatatttcataaccaattgaaaaacattataatcaacatttttacatctttgtaattttttagctcggttcgtataaactttgaccatatctccgacttgtgtcctcaatcgagatgtcctagaatcaggttgcatttgtttcgcattgaacttttagacccatgatttttaatacatatagttaaaaattatttttatttatgacccatgatttatcaatgtatggaagttagatttggcaaagctttctttttaattacatctaataagtatttccctccattttacctctgtctccaaaagtatttccctccatttttttactgctaaagcaaatctcacgacgcttcgtaatcatcgtgcagtttccatcttcaactagataacctcaagcgggctcctctcctcttcatcttcctcacccatccgtcaggcgccagccatcccgcgctccagctatcgcgcccagacagccgccatcgtgccagacgatgccggctgccctccaggctccaggtacgccgccgcccgccgggccccctcctccctcctcagtcctccctacgccctacaggacccaggtatgccgtcgcccgtcggccgccagcccccctccagatccagtgaatgtgtgataaactgtttggtatatggagcaactcctatgatcccttggctgctgatgttcataatccca

SEQ ID NO: 361 - DNA, 2267 bp, Zea mays
  source (0)...(0): Zea mays BAC clone full insert sequence contig bacm.pk147.d02.fis38
  misc_feature (1)...(2267): n = A,T,C or G
ttgcttctacccaagatgtagaaacaaaagaatgcgtggcacaagtatcaaataatacttttgctaggtaggatttgattggaaacatacctactgccatgttttgagcattctagattgcttcggcctctaggtggttcacctttccacagttgtaagccagaccacgacctcctggtgcttgctgtggtgctccttgtcttgctggggcattgactgttggtgactgctaagctgctttctttggacagttcttcgcccagtggttttgttctccacagtagaagcacgcacggactcctacctgcatggagctacttgactattctagttggttgctggggcaggaaggcgagctgcatggttattctgacgctggtattgatttcctccctgctggttgctctgactgtactgctgctgctgctgaggaaactgcctctggtactggtgctaatgatgacgctgatgctggtgaccttgcatgaattgctggggtgagttgcctgagtagcgggacgactgttactctcgacctgagattcaccgatcttgcgtttcctgtcctccatctcccgacacttccttttagtcatgattgctctatcgatcaagtgctggaaggtggggaaagtgtggttcatcagctggtagtggaggggatcaaccaatcctctcaggaaacggtactgcctcttagcatccgtgttgacatcttctggggcgtaacatgacagctgcagaaacttatccctgtactcactaacggacatgggaccttgcttcagggcgagaaactcctccttcctcactatcatcagtccctcggaaacgtgatagcgacgaaagttgtccctgaattcctcccaggtgatggctttagggttggcatgagtggggaggtaagactcccaccaggactgtgttgctccccttagctgacggggaccatacagaaccttctcgcgattgttgcactaggcagtgtgcaactcgcgctccatagtacacaaccaatcttcagcgtccatggaatcatcagagtgggcaaagacagggggatggcccctcttngattctgcccgcttgtctctgggcacctgtggcatctggacttgcactagaggctaaggtgagggtggctactgctgcacctactgcatcgctgctaaggtctaaccaattgcttggactgcttgngtctgcattaggcacatctgctcaatggtcattgggggtggcgtaggcaattgctgctgagctgcatcttcatggggtgcctgctgttccgactgagcacgccttgcacctctgcgcctgttctcagtcatctgtagaaagcacacacacatcagatctgactctgcagtctttcagcattagaaaagatatacagaaatctccatagcactaaacaaatgatcatcttcactgacaacttctcagataaagaggaaagtggaaataaatggcccctcatgaattctgcccgcttttctctgggcacctgtggcatctggacttgcactagaggctaaggtgagggtggctactgctgcacctactacatcgctgctaaggtctaaccaattgcttggactgcttgggtctgtattaggaacatctgctcaatggtcattgggggtggcggtggcaattgctgctgagctgcatcttcatggggtgcctgctcttccagctgagcacgccttgcacctctgcgcctgttctcagtcatctgtagaaagcacacacacatcagatctgactctgcagtctttcagcattagaaaagatatacggaaatctccatagcactaaacaaatgatcatcttcactgacaacttctcagataaagaggaaactggaaataaatggattacccaactaaataactgactttatgaataactacaccaagttggaggggatacccacaccttgatgacaatcattacaagatccaacttcattacatgttcatcacaacaagcatttgaacatatgataagcaaactaactgataaacccaacgggtagaaagggtgcccgatcttttgatgagagatgatggaggtggaaaacttgttggagaacgacgttggctgcccgactaccacaaccaagatggtgtggcgccttgagcgacaggtacaccgtctcctgataactacgatttggggtggaggtcgacgttgtgctatccgactacaacaaccacaagtgtgttgcgccttagcgatagttacaccggctcctgttgttg

SEQ ID NO: 362 - DNA, 4769 bp, Zea mays
  source (0)...(0): Zea mays BAC clone full insert sequence contig bacm.pk147.d02.fis39
tagttcggagtagtaatgactagttaagtaagagggtagttcatacacaacacgaaggccatgctataagattgttgccgacatcaccaataacctccatgttgtcgtatggtcgaatcaaaggctcaataggcagtattacaagtctaacacgcaccatccaaaattctctgcctaacttaacacctccaactttatgatttgggtctcgaccaagtactgtgcctaaggcaacagtcttggttggacatctccagctttttaagaacacttgtgctccagtctagtaaacatgctcaagtgtatcagtaaatacttatgtaatgtgggcacaataatggtaagaaaattttgattttaccaatattgactcatctgttggtcggtcacctggagtaccctaatttatggacaaaaatattgaattagtaaagtggatttaagaatatgaatgtacacaaatttttgagtcaccttttgtttcatgcaccataacctataactaatgcatattagtaatgaaaacaattcgatatacttaacaagaaagttgattttcactgtcacctttgatgtggtagcacacttggttttatcaaaggtagttgcagattgcatatctttcctttttacctgtcattacatcacaatgtgtattcaatattttaatatttttggatgattacgaaatagttaattttgtacatattattaacttcaatttagttatgcaacaccctagtgtactgccaattaaaatgcatctccattcaagaatgagtagtatgtgagatactactaattactaatgaacaatgaatacaatacatgggtcatgtgtagaagtacctagttcttagatgcttcttcatttaaggaagtagaagttgcttccttggtcatactctgtatgtgcgagacatcaatgtaaagataatcaatcatgattatgtatgttgaataaatttattgcattcccacctttgatgaattagcgagcttagtattatcgaaggtaatgtctctttccaactcaaattgccttgtttgccaatatattaaattgaaaaatgaatataataaaacatcactttgtagggcgtatatattccatgtattgaaattttgatgtagctgaccttatgggtagtggctagtctatcagttcgttgtaatttaccttgcctagtatcagccaccttaatcttttttaattcaatacatattattaatgtttgcattataccatgaaatctagaaagatgagttatgaggtagcagaggaccttatggatagtagaagtttttctgaatgttggttgcaaatcctcgtactcctttgcctcttgctctctctttatgaaatacagattagtagtttagcaaaaaaatttatagggggtattgagtagcgctactttttgctggggctgtagctatggctgctgctgtacattgtaaaataactatgttgtgttgtagaaaaagccatagcgcagccacaacaatctgaagcgaacaaggcaatgtaatgcaatcatacctgagagtaagttttttcattgtccatcctgaattcttgattttgtggctcaacacatacacgctgatgaaaaataactacaagatgaagtagtaggtactaaaatgtaagaaagtgcggatgtgtaaattccatacagatgcctactttacgttttgaagacgttggaaattgattcgctggaagatcgtccaaacatccctgtcatagcaaataaataaccaaatggattagatgttacacatagacctactgtatgaactgattgtgaaatggagttcaataattttacatgtacactttgatgctgttcgaagagtacactgatgaggacatcagtatgagtacgactacaccagcagcacctcaacatcaagcgccacttccttcattagctgggccaatcactcgggcccgtgccagagatcttaacttcgtcattgtactaaggaatgagggcccagaagaatagacgaccagcccaactgcggcccatagtggacgacctagggttggccgcccctaggggctgcgccccctctctatttaaacgggagctgcgcctcctttgttcttcgagttttgttttacattagctttagctactctcgaacacgcgcaaatctgcgctgtcttcgtgtattcagaactccaccctcgagtaatagattagattgctcgcatctttttcttgttcgttcttcgattgcgcacaggaaacgatcttcgtgatcaggccgatctcgcatcagcaaggtcggtaaccacagggagttggttcagcgattgcattggcgcctcgagcttgctcgtcgtagtcggatcgcaagggtcaacttccgccaaatcggaattatctctactcgccgaaagatcgggcacctcagctacatcaattggtatcagatttccaggttgatcggtgagtttatcgagtgtttttttcctacagtccacaaaaccacataaaaattcaggttagaccttatcccaacacccttttgagcctcgcactttctttcaataatctgcattgttgaatttgtgtgctttcgcgtcatttgttgctggttgcattgtgttcttccaccattcaaaccctagcgccgccaccatctcccctttgatcacgccacaaaccgagtcaacatcgtttccttgtttttctccttcggttacgtcaaaaaaaaacagaaaaaacaaaccgagtcaacggccgtttccttgtttttctccttcggttacgaaaaaaaacagaaaaaaaaacaaaccgagtcaacattgtttccttgtttttctccttcggttacgtcaaaaaaaaacagaaacaaaaaacaacgaaggagaaaggatacagttgtttcatcccggtcgtttgaaaacataacttgaggtacctttcttaaaccgggcataacttttcgctcgggtgtccaaaaaatctgaaatttttacaggagctagttgacaccattctgaggccggccaaactgaccttcggtctgtttgggtttcgataaaattgtcaaaaaaattcaggaaaataaagaaaaaaatccgtcaaagttctcgcacgctctttagagaacttcctgattttctgtagaccacatcagaactctgttttaggtgaaacttcgtgtagctcctattttgttgcttcttgtgctgagaaaaatatcaaaaaaatcatacaaaaaagaaaaacaaaatcacttgtgattcctactagtggcctcgctagtacaatatttacggtactgccattctgctagttccatccgtcctttgcacttgtggccagcaatatagtttcgtgttctgcactataattcaactttgcattattgtttgatcgtgctaatccttgacttgagtgcagcctacccacaactccacatatttctacgacgagcaggtttctgtttctccacgcaatcgctcatccaatctttcaccggttccacctgttgattgcagttcaccactgtggcttggtaagaacggataagaacttgataacagcactagtgtgagcgccttgtgagtagtacacccctgtttttgtcgttggtttttcttcttttggtgtttgcgctaactatggcaggagcacacgacatggtggacgcccagttgcaggaagtaaggggacaagttgatggacttgctgctgacattaggacgatgcatgaacggcttgattcaacgatcacttcgacgaccgagcgtttcaaccaacttgaccttgctcaaacggcgactcgcaccacactcgacaccatccttgcacgccttgatgcattgaccacaaagatggagcaggaatacggcggtgacactgagcaggacgatggagatcgccgtggtcgtgcacgtcgtgtggttcgtcatccccctaatgacttattttctaagattaaatttaaaattccatcttttaatggtaaatatgatcctgctgcatatcttgattgggaattagaggtagaacagaaattttcatgccatgatattcctgctaatagccaagtgaaggctgccattagtgaatttactgattttgctttaatttggtggcgtgagtataaacaaaaacttcccattaacagtgtcattacttggacccaattaaaaactgccatgcgccacagatttgttccttcctattatgctcgtgatttgcttaacaaaatgcagcgttttcaacaaggttcacaatctgttgaggaatattaccaggagttgcaaaagggtatgcttcgttgtggtttggttgagtccgatgacgctgctatggcgcgttttcgtggtggtttgaacagggaaattcaggatatacttgattataaggattattttgatataaccacattgtttgaatatgcttgcaaagctgaacgtgaagtgcagggacgacgatcaaagacatatactaactcttttgcaggccggggtccaacacacagctcaactccgtccagccctgcaccttctacgcctagcactacatcgcgcacagggacgaccaagccagtggcgccccctgccaaaggcgccgcttcttccacaggacgtacacgggatattaagtgccatcgttgcagagggtttgggcacatgattcgggactgcccaaacaagcgtaccttgcttatacgtgacaatggtgagtactcttcagctagtgattctgaggaaactagtcatgctatgattgccacta

SEQ ID NO: 363 - DNA, 4219 bp, Zea mays
  source (0)...(0): Zea mays BAC clone full insert sequence contig bacm.pk147.d02.fis40
  misc_feature (1)...(4219): n = A,T,C or G
cccgtatacactcctactaggggaatgggaaattccaatccgctcgaggtcgacggtatttttcagcttgaggttcgtgattatattgttcgtcatgcttcggggaaaaaactatcagagaaagaagagcaagaggcccagcactacgcccaaaaactgaaatatccaaagggggcgttaatattcaatggcagtggagaagaagacttcttgtattgtcttcccgacagcaaggagatttctgtctgtcgggagatgagcaagagcttcggattcccaactttagaagacgggctctcagtgctgtcgaagaacgatctggccgacagcctggcttataatagcttanaggtgcgacaaatgaaatccttgtattttttgttgagtccaaaatttttcgtttgtttaaacctattgactcacacatctttgcaggggctgatacttagcaatgccctcagggcacagaaagatgctgaagacgaagggtgttctatagccctgagcaaccttcgttcccgaagtaattgaactgaggaacgaaggtcttgaaaaagataaaatattacattcattgataaataaaataaagcaagacgaagtcgcctttaaaggtcaagctaaggctcagaagcgcgagattgaagatcttcggaaacaactggccagagccaaggaagaacgcatacttgaagaaacgaagcgagaactcagcgaccaatgggcagatcacctagaaggaactgttgaagagcttcgttcgtccaagaagaaatgttataacaaatctatagagtgtgttaagaagttaaaagctagcttcgccagagtcggcacattctcaagcgaagaaaacttcacaagaggcaatcccgaagatcccatcgaatggatcgagcacgaagctgtggccttcgaggaaattttaaatagccgtggagatatatgtgctttctcgggtgccagaggaattgccaccattttagagaaaaagggctgcgaacatgtaaaaattttagcacaatccgaagctgctttgtcctttgaagatgcaagagatccttcggcagaagctagcatggttggtggaaaatttttcactgatatctgggataatggtggccgagaaatggccggagaaattattcaaaaaagtgaaaagggcattcatgatgctagagaggtggctgaggctgctgaaaaaagcgcagagcccgaagggcaaataggtatcaactgatggttttattgtgttgtaattttcgattttaaacttcgttcgcaatttgtaacagcaatgtagccgtatcctgtcctccttcagatcctaccaaagcgtcttcggggcctcccccgaaaggagacgacgaaattaaagagatggctgaagctatcatggatgaagttgttaatcggctcctaaacgaggctgcagaagtcattttgagagaagattaagtattattgtaaaaacctctgaaatgtaatatattgtaacattttgtaaccctgaatgtaatatacctgtttttgttgttcaattctttacgatgcatgaaattttacacgtaccatttttgagtctttgacgaaaaaacaccttcccttcttttcatgcttcgtgaagaagaatttttctttgtcacaacaatatccagtgttctgatgaataatatccaggcttcgtgaagatattttccgaagctacacttccgaagattaataatgtgtctccttttgacatcatgattcttcccttttttcaaaacgtccctctgtagatcgatattgtatccacctcttgtgccatatgcaacatgatgtatgatgcttatgctatgcaaaatgatgcgatgatgttatgttatgtgaggtgatgtttattctgaagatacgtacgcatccctgcaataaaacacaatcttttataagcctcccttaggagcttcttcgccttttacttcagcggaatcagcgtttatttttcactgtaagcctcccttaggagcttcttcgccttttactttcagcggtattcgcgttgacttttcgcgcttcgccttttacttaggcggtatcagcgttgacttttcgctgtatgctctgcattccctttggaacgactttggagcagaaaacttactctgcactccttctggagcggctttttgtgacttcggcaaacttactctgcgttccttagaacgactttttgttgcttcgaagaattttcgatgatgtgaaggttctctttgttatcacaaatctttaaacttcaacaacttaggcctgtgaagaaaatatattttccttgtggcaaaacaacgaaactacttacatgaaatccaaacaatgttctttattacacagaaaataagactgaataagaaagactgctattaaggtaggatatttgtcaatagatgtgctttgactctggcacagtgctgttgactgtacgagcttcggactgctctctgaagtccctttggtgtggagcatactggctcccttctggctgctggccttgttgcagcggaggtgggggcggaggctgttgccaggaagcttggggttgactcaccgaagcaacagaaactgcaggatggttgcccacatattctgggatgtaaggcgaatgatacgaagcagtatgcatgacctgcttcggctgagcttgttgtgctgcggctttggctatttccttttgcttttggatggtaacatggcacatcctggtggtatggcctttgttctcaccgcaaaacaagcaaaagattcttcttggttgatctccgaatcttccgccgaagcccctggcgcctctgcctcttggggctggtggtcggaaggagccttgctgttgccctgaagcttgtgaggaacactgtggcctttgctgttggctccctcgatcatcactttgggtagagttatgaattgatctaacgtgccttggatagaaccttcctccgaagcccctggtcatttcagaaaacctgaaagcctcctcccttctttggcgaaaatcattatcggcccgaatgtactcgtccatcttctggagcagcttctccaaagtttgaggaggcttcctagcgaagtactgagctgacggtcctggccgaagccccttgatcatggcctcaatgacaatttcattgggcaccgttggtgcctgtgccctcaaacgcaagaacctccggacgtacgcctgaaggtattcttcgtgatcctaggtgcactggaatagagcttgagcagtgaccggcttcgtctgaaacccttgaaagctagttaacaacaagtccttcagcttctgccatgaagtaatcgttcctggtcgaagggaggaataccaggtttgagcaacactcctgacagccataacaaaagatttggccatgactgcagcattgccaccatacgaagatactgttgcttcgtagctcatcaaaaactgcttcgggtctgagtggccatcgaatacaggaagctgaggcggcttgtaggacggagggcaaggtgtagcctgcagctcagcggacagaggagaagcatcatcgaaaacaaaattcccatgatggaaattatcataccagccatcttcgttgaggaaaccctcctgatgaaggtcttggtgctgaggccttcggtgctgctcattctgagcaagatgacgaacttcttcagaggcttcgtctatctgcctttgcagttcagctagcctggccatcttttctttcttcctttgcacctgttgatgaagcatctccatgtctctgatttcttgatctatctcgtcctctggtggtgtcgggctgacagccttccttttctggcttcgtgcttcccgaagggagactgtctcctgattgtggtccagcggttgcagagctgcagtcccagtcgctgaagctttcttcggcgccatagcgaaggtttatgatcgccgaaggtgtttaaaaaactcaaagagtggaagtgagttcaccggaggtgggcgccaatgttggtgacttgctctcaaatgctatgagttaagaacaaggcaacatagaaaatgttaatcggcaaaatcctttgtccttcgaagcattattccctttaggatataatggttttcggacgaaggttatgaagggcgtaccttcataaatacattatacaatgacgaaggatgaatcataaggaatataaaggacaacatagacaatta

SEQ ID NO: 364 - DNA, 4913 bp, Zea mays
  source (0)...(0): Zea mays BAC clone full insert sequence contig bacm.pk147.d02.fis41
  misc_feature (1)...(4913): n = A,T,C or G
ttccatgttgtgcttgaacattccattccgagcccgcatctgaccgtggtgaccgtcacaagtggtgttcttctgcagtccgaatccagcatgttcaaatccttttccctttcggtcttctccctgattcctaagcaaaacaagagtgcacgggtctccatggtctaaatatgatggacatgaactcaagagtgtaatcacntgatggttgagttgacgagcacgagcgcgagtaatgggaccagaaattggtacttgtattggtatagatgcatcagtagtgtggatgtcttcatcaggttccggtggcaaaaactcgtgcttgtatgcaccccgacacccgttttcggaattggtgacgtgcggcaacgaaattgcgccaaaccaccccaaacatgagttttggatctaaagtagtggattgggcatgttcgttgcgcaaaacgaagaaatggttccggtggcgaaaactcgtgctttgtatgcaccgcgacacccattttcggaatgggtgacgtgcagcaacgaaattgcacgaaaccaccccaaacatgagttttggacctaaagtagtggattgggcatgttcgttgcgaaaaacgaagaaatggttacggtggcaaaaactcgtgcttgtatgcaccccgacacccgttttcggaattggtgacgtgcgacaacaaaattgcgcgaaaccaccccaaacatgagttttggacctaaagtagtggattgggcatgtttgttatgaaaaacgaagaaatggttccggtggcgaaaactcatgctttgtatgcaccccaacatccattttcggaatgggtgacgtgcggcaacaaaattgcgcaaaaccaccccaaacatgagttttcgacctacagtagtggattgggcatgttcgttgcgaaaaacgaataaacggttccggtggcaaaaactcgtgcttgtatgcaccccgacacccgttttcggaattggtgacgtgcggcaacgaaattgcgcgaaaccaccccaaacatcagttttggacctaaagtagtggattgggcatgttcattgagcaaaacgaagaaatggttccggtggcgaaaactcgtgctttgtatgcaccccgacacccattttcggaatgggtgacgtgcggcaacgaaattgcacgaaaccaccccaaacatgagttttggacctaaagtagtggattgggcatgttcgttgcgaaaaacgaataaatggtttgggtggcaaaaactcgtgcttgtatgcaccccaacacccgttttcggaattggtgacgtgcggcaacgaaattgcgcgaaaccaccccaaacattagttttggacctaaagtagtggattgggcatgttcgttgcgaaaaacgaagaaatggttccggtggcgaaaactcatgcaccccgacacccattttcggaatgggtgacgtgcggcaacgatatagcgtgaaaccaccccaaacatgagttttggacctaaagtagtggattgggcatgttcgttgcgaaaaacgaggaattggttccggtggcaaaaaactcgtgctttgcatgcaccccgcccgacacccgtttttgtaatgggtgacgtgcggcaacgaaattgcgcgaaaccactccaaacatgagttttggacctaaagtagtggattgggcatgttcgttgcgaaaagcgaaaaaatggttccggtggcgaaaactcatgctttctatgcaccccgacacccgttttcggaatgggtgacgtgcggcaacgaaattgcacgaaaccaccccaaacatgagttttggacctaaagtagtggattgggcatgttcgttgtgaaaaacgaataaatggttctggtggcaaaaactcgtgcttctatgcaccccaacacccgttttcggaattggtgacgtgcggcaatgaaattgcgcgaaaccaccccaaacattagtgtcggggaccataattaggggtaccctcaaggctcctaattctcagctggtaacccccatcagcataaagctgcaaaggcctgatgggtgcgattaagtcagggatcagtccattcgagggactcgatcacgcctcgcccgagcctagccttagacaagggcagccgacctcggaggatctccgtctcgcccgaggcccccctccagcggcgaacgtatttccggctcaggccctgtcttcgccaagaagcaaccctgaccaaatcgccgcaccgaccgaccaaatcgcaggagcatttaatgcaaaggcaacctgacgcctttatcctgacgcgcgcccttcagccgacagagccgaagtgaccgccgtcacttcgccgctccactaaccgtcctgacagaaagacagcgccgcctgcgccgctccgactgcggtgccacttgacagagtgaggctgacaggcagtcaggcccggccgcaggcaccataggaagctccgcttcgcccgacccagggctcggactcgagctaagccccggaagacggcgaactccgctccgcccgacccagggctcggactcgggctaagccccagaagacggcgaactccgctccgccggacccaaggctcggactcgggctaagccccggaagacggcgaactccgctccgcccgacctagggctcggactcgggctaagccccggaagatgtcgaactccgctccgcccgacccagggctcggactcgggctaagccccggaagacggcgaactccactccgcccgacccagggctcggacttgggctcagccctagaagacgacgaactccgctccgcccgaccccagggctcgaactccgccctggcctcagccgacggtctccgcctcgcctgaaccaggggctcggactcgacctcggccacggaagacagactcgaccttggcttcggaggagcttccacatcgcccaacctagggcgcagaccagccacgtcagcaggaggcgccatcatcaccctaccccgagctgactcgggccaaggggaacaagaccggcgtcccatctggctcgctccgcagattgggcaatgatgcggccccgcataatttntggagacagcgctctcagccnccttacggaagcaagaggacgtcagcaaggactcaacagctccgacagctgtccctccgccaggctccatcactcttccgacggccacgacatcacaccagttgggtgccaaaatctctccggctgccacaacggcatgtacttagggcgctagctctcctccgctagacacgtagcactccgctacaccccattgtacacctggatcctctccttacgcctataaaaggaaggaccagggccctcttagagagggttggccgcgaggggacgaggacgagacaggcgctcgtgtgaggccgctcgctccctctcccgcgtggacgcttgtaaccccctactgcaagcgcacccgacctgggcgcgggacgaacacgaaggtcgcgggatttccacctctctcacgcctgtctccggtcgcctcacttccccccttcgcgctcggcctcgcgccgacccatctgggctggggcacgcggcgacatttcactcgtcggcttagggaccccccggtcttgaaatgccgacaattagttttggacctaaagtagtggattgggcatgttcgttgcgaaaaacgaagaaatggttccggtggcgaaaactcatgcaccccgacacccgttttcggaatgggtgacgtgcggcaacgatatagtgtgaaaccaccccaaacatgagttttggacctaaagtagtggattgggcatgttcgttgcgaaaaacgaagaattggttccggcgtagaattttttgggggtagaatttttttcttcttttctctcaccaaattcaggcgttactctttcctttttcccttttcttctcgctaagccttgatcttttctaaaagttatagcgagaattagctcgaaatcttgtgtaaccaaaacctagaactatttttttggttgttgcatcatgccagattatgcactcttgtgtttgtggttgagtgaattggagaattaggcatataagaaaatgtggaaattaaaaaaagaaaagccttttctttttctctctccccccttctccccttttggcccagtcgcccccttcccctggcccaagcggcccagccgccccccctcttcccccccgtgggccgtcctggcggcccagccgcgcgcccctcccccctttgggcccggtcggcccaattgccccctcccctttttcttttttccaaaaatcccctccccgtgggccccgtccgtcatcccctctctcactccctctccctaaccgtcgtcgccgcccctgccctagcactgccgccgcccctccccggcgccgccgccgcgccgtcctccccctccggtgaggcttctcccccccccccccctctcaagaaggcgaatgagtgagttttttcagattcccccccttgcgctccctgttttctttttacacgggggggggggggggggagcngcaatttttttttttttcccccggggaggggggggggntacnnaataanntatacccccctttttctagggggggggggggggggctacanncnttttggtggcacccacccataatcagtccccgtcgggggggcgggactcaccgttatcccccagtaaggccgggcgatacccgcggccgaatatccgggtgagtgaagagcgcgaggaaaaagcccaggagcccctcggaaattgcccgtggaggggggtctttgccgtaagccccccccccccccgaacgaatgacggcaggacccagagataggttggacaggtgtggcggagcggaggctgtcgtgtagagaggcccggcgcgtgtccccacccccacacagcacgcc

SEQ ID NO: 365 - DNA, 3184 bp, Zea mays
  source (0)...(0): Zea mays BAC clone full insert sequence contig bacm.pk147.d02.fis42
  misc_feature (1)...(3184): n = A,T,C or G
gaaagcaactgcttaaccttaactccacatacagctagtccaatgggacatttgctaagtacgttgatgtgtactcacccttgctttacaaaccaccccaccccaggttgtccccacggtacgcagtgctcaggaggagatgctggcaacatggaggactttgaggagttccaggactacgatgagttctagtttatcttagtggcaaacccccagtcagctgccagtgtaggcttatcttctacgtttcgtatttccacactttgatattaatgttgaaaactatggttatgtattctctgtggatgtcttggacatcttgatgtaaataaagtacctttccgctatttactttgagcattatgtgatgatgtccaattatgtgatcattgtgtatgtgagttctgatcctggcacgtacatggttcgcattcggtttgccttccaaaaccgggtgtgacataagtggtatcaaagccttgctgactgtaggactgctaacctagactaggatggtcaccctaaggactatagacccctactcttaccttgaccttagtgtcctttcaaaagttggtcatctttaccaattctatgttacctacttatctcacaaaattttgtctcacttttctttctatttactttctggtcttatagttgtactctcactcttgtgcttacgatgtcttttgtagatggctcatcttagatgcactgcacgtaagtcagtgatcccctttttgccttctcgcctggcggagcgtccactgcatcgcacggtgccaggtcagtccagtcacctggagatactgcatcatcgcctgcacgaggagcaggagcgccgaagccaggagcaggagcagcaggactcttcccccttgcctcagcaggaggtggagtttgggaggccgcctgcatttgcacctcagccagagatgccccctgcactaccacaggccatcccaactgctgggggagaccctaatggagatggatgcgacgacgacgccggtggcagttcgagccacgacacggagctcttggaggagccagagccggaggggtggatcgctagacccatcactcgtgacgctgctcgcgggtgtcacttccacgacgctctcaacaccttgctgcgtcgggccttcgaccgacacacttggtccatcgagtaccgttgtgtagtctaccagcatcgtcgcgggttatactcggaccagtgggaggctacttgcttggtgcaccatctggacgatgatctctggggtgcagaggccttctcagagcactattctattactgatagggatattgccgaggcagccatgcaaggtgcagcacgacgtgcactttctcagtattactcgttgttcagcggggtagctaatggccttgacctgaagtactaccctcgttgttcgaccgacaatgctggaggtgtgattaacacattggtgagggcaatcctaggctgaacagcatggtcaacctagccaccgtgctcaacaccgagttggaccacgcccttgacgagttgggcaaggttcgtgcagaggttgcggaattgcgtgctgagtgcgtagcatgccactatctggatggtggttctcccgcccctgtcgggattcagcacccttaccgctcaacgccccatggtcgcttcgactatggtaccccagactgcaggacccggatagatttggttccattgatcgaaatagtcggagtctgtaataatgcttaattcagtgtcttagtctagtgagtcttaattagagttagtgatgaggacatcactgccatcaatacaccacaccagcgacctccttcaccatttaatcatggaccagtgnnnnnnnnnnnnnnnnnnnnnnnnnnntatcaggtgaactcgttccttgttgttgaagctaatcattccttaaatgaggtactaataccttgtgattactttattattctaaggtgtttgggaggtgaaccatctagaatttgagaaggcaacaaggcaataaaagctgctccacttgaggggatttcgaaactacaacaagtgcaagtttaagagggcatatctttcagctcccaaggttgtttaatgcaaataagcacttgttggaaaggtccctttgtctactttctagtggatcaagaatcaacgagagatcaaacactaagcgtccagaaactgccgagtgaactcctgctctacccaagtcaatttcgtaactgcagcatgcaccaaattaaatggagcataactttccactcccaaggttgtttagtgcaaataactacttgttggaaagctctcttcgtctactttcatgtgcatcaagaatcaatgacagaaaccaaacgaggcgtccagaaactgctgagagagtttcgttctccattagaactcctttctattcctctatttaagcaactagcagccaccaaagaacttgggtttttgtttgatgtaagtttagcctttgctacttccttgtaaacgcgtgtgtcggctagaccacccggatatttgaaacagaaccccaactctatcagatccgtgagcgtctgctttttatcttgttcttgcttgttctcgattgcttgcaggttcaaggttgttcttggcacggcaagagcagcaacaacaggagtcggtgtaactatcgctaaggcgcaacacccttgtggttgttgtagtcggatagcacaacgtcgacctccaccccaaatcgtagttatcaggagacggtgtatctgtcgctcaaggcgccacaccatcttggttgtggtagtcgggcagccaacgtcgttctccaacaagttttctacctccatcatctctcatcgaaagatcgggcacccttctacccgttgggtttatcaagtggtatcaaatttcaggttgctcggtgagagatctcaatcttccttgttttgtttacctacagtccacttttgcccaaagatatatttagagcagaaattcacctaaaaacagtttgagcctttgctttactacttagttttcgacttgttgaattcacggttgctgcatttgggtcgagttgctggtctaaagttttcttaccgctagagtttcgagttcgcgccaccttatttcaatcaccagtttagacctcttgctgcaattcaaccaaaaagaagagaaagcaaaaggcga

SEQ ID NO: 366 - DNA, 6271 bp, Zea mays
  source (0)...(0): Zea mays BAC clone full insert sequence contig bacm.pk147.d02.fis43
  misc_feature (1)...(6271): n = A,T,C or G
ggtttgccttcttgtaacaaaacaccacccaatccaattccactagcatcacattcaagctcaaaagtcttattaaaatcaggaagttggaggagaggtgcatgtgtcaacttatctttcagcacgttgaaagcgtgctcttgtactttgccccaactaaaatgcactcccttcttcgtaagctcattcaaaggtgcagcaatggtgctaaagtccttcacaaaacggcgatagaagccagcaagtcctaggaaactccgcacctgtgtgatagtctttggcataggccatccatgtatcgcttctaccttggcttgatcaacctcaattccctgtggagtcacaacataaccaagaaacgaaactcgatcggtgcaaaatgtgcacttctcaaggttaccaaataaacgtgcatctcgtaaagcattaaaaacagcacgcatgtgatcaacatgttcatccatagatttgctgtagatcaatatgtcatcaaagtatactaccacaaattttccaatgaaggcacgcaaaacctcgttcattaatctcatgaaagtgctaggtgcattagttaacccaaaaggcatgactaaccactcatacaatccgaacttagttttgaaagcagttttccattcatctcccaatttcatacgaatctggtggtacccactacgcaaatcaactttagaaaagacaatggcaccactcaattcatcaagcatatcatctaaacgtggaatagggtgtcgataacgtatcgtgatattattaatagccctacaatcaacacacatacgccatgttccatcttttttaggcactaaaataaccggaacagcacacggactaagagactcacgcacgtaacctttgtcgagtagttcttgcacttgtcgctgaatttcttttgtttcctctggatttgtcctatatggcgcacgattcggcaaagatgcaccaggaataagatcaatttggtgctcaatccctcgtataggtggcagcccctctggtatctcacttggaaatacatcagaatactcctgcaaaatgttagtaataacaggaggcaaagaatgctgcatatcttgaattgaaatcaaagcatccttgcataccaaggcgtaggcaacagtagtggaagcaaataattcattaacatcagtttttgttgcaagcaagcaatgtcctttcaattttatcccatctttgttattaccaacagctttaatattcttgttgttctcagttttagctttggtagctttagcaacatcatcacgcacaatagcctcaggggacatgggaagcaaaataattttcttatcatggtgtatgagagaatatggatttgatcaaccatgatgcatacaatctgaatcaaattgctatggtctacctagcagaatattacaagcatccataggcacaacatcacagtcaacaacatcacgatatgaaccaatagcaaaattaattcgtaccagcttggttaccttgaccttaccactattgttaagccattgaatgtgatatggatgcgggtgcggtttggtcgtaagtgcaagcttctccaccatgtcgctgctagccaagttgttgcagctacctccatcaatgatcaaacgacatgaacgctccttaatgacacactttgtttgaaacaacgtatgtcgctgattctgctctgccttctccatttgtgcactaagcacacgctgtacaatgaggctctcataatgctctgcatcatctgcaccaatctgttcttcgggtggttccttagtgcctgcatcatcagccgcaagcaaagcaagtgtagcttcatccaaatcactagcagaggaatacccaccatcgtcttttaccaccaaaacacgctgattaggacaatcacgctgcacgtgtccatagcccttgcatcgataacacagaacatctcttgttctacccgtggaggctactgaagaggcactacctgctggtttctaggcagatttggttgctgaatttgtggaagatgcacgtggtttgtcgccagaggaaggcgggggtgctggtcgacttggcgagggagttggtgctggtgtacggccggtcatggacgtagtcgtgcgctgttgccatggtgtagattttcctgcagaaacattagaccttgcactagcacgtcgtccctgcacttccctttcagctttgcaagcaagatgaaacaatcgggttacattaacataatctttataagcaaggatgtcctgaatttccctatttaacccgcccaaaaatctagccatagcagattcctcaccctcctctatgttacaacgtagcatacccatttgtaattcctgataatattcttctacacttttagtaccctgtctcaattgttgcaacttgtttaacatatcacgtgcataataagaaggaacaaatctagcccgcatgacccgtttcaatgcatcccaagtttgtggcatgttattaggattcttcttaccatgttctctccaccaaacagaagcaaattcagtaaactcactagtagcagctctaacccgcgcattctcaggaaattcatggcatgcaaacttttgatcaaccgcaatctcccaagtaatgtaagcattagggtcatatttaccatcaaaaggaggtattttaaatttaaccttactaaaagcatcatcattaccatgtgcctcacgtcggcgaaaaccacccatacctctacggttagtacgtagtcgccggcgattaggtgcttcttggtcatcttgttcagtatcagcaacatagtcatcccagttaccttcggcgccctcatcacgcccaccattgatattagcatgcatctcatcaaaccgcctcaagagtgcgacaaggctcttggcaatatgagcaactgtcatttccacatttgcaagtttggtgtttgtgtcgatctgtgtggcctccaattgccccatcttttcattcgtcacctgcatgtcattatcaagaccttccgtgtgcgtcttcaccagccttacaaagtgttgtatgatacccttggtgcgaggagagtgtggcatattacgagaagcatcatcaacctccaatcctgccatggttagacgaacagaggcaacaagaaaaaaaaacgtgaaggaatgaaaactctacaactattaggatgtagctactgcaaggcgctcactctcaacctgcctaatgtagctgaggtacccgatctttgggcgagtagagataattccgatttggcggaagatgacccttgcgatccgactacgacgagcaagcccgaggcgccaatgcaatcgctgaaccaactccctgtggttaccgaccttgctgatgcgagatcagcctgatcacgaagatcgtttcctgtgcgcaatcgaagaacgaacaagaaaaagatgcgagcaatctaatctattactcgagggtggagttctgaatacacgaagacaacgcagatttgcgcgtgttcgagagtagctaaggctaacgtaaaacaaaactcagaaaataaaggagaggcgcagctcctgaataaattagagagggggcgcagcccctaggggcggccaaccctaggtcgtccattatgggccgcaattgggctggtcgtctattcttccngggtcntcgntcttnnnacacatgatgtagttcaattctcttgcacgggcccgagtcactggcccaggtggaaggggtggcgcctgggctggagaaggtgctgctggtgtagatgtgctcgtgttggtgttgatgtccgcatcactgccacacaagctcttaccaattcttaccttgcacaacaggaggggtcagcaaccaacaagtctgcaaccgtggaataagtgtatcggtgccgcagcaacacgacctgtcaaactgtagtcgaaatatgtagagttgtaggtggcctgaagcaaggaatacactagtaccacgttagttacaaaagcaagctgaataatcgttcaacggtggtactgtgctggtcctaggctaaaccaggctagagacgtgagcctaggcacagaggtagtcactgaaaaagaacaactagcacagcacaaagagaaacaacagatttagagattcagcccccttcttcttcttttcctttttttcttttctattcttttttttcttcttcttctgttttttttgcaggggcctaaacccttttttttcactatgacaacccaaacaataaagatattgctaacagcccctttaaatcagatttaacaaatcttgttaatatagaaagtccagaaatctctacgatgattgcggagcgctcagaacgaattttgagatgcggtcagatccgttggaaagaagataagataagctttccaaattgtatttaaacttccaaatcggatatgatatgtatccgtggtggcaaaaacgaaccagagatgtttttggtgatggtggatctcgtggtgaccaaaacgtggtagaactcaaaactctaaaggaataaactaagaccagcaactcgacacaaccgatgcaaccaaaaactcaacaagccctaactaagtagtactagtaaatgctcaatggtttataggattgcggtaaaactaatctactattttttggctttttctggactataggagataagaaaacagcgaagaaaagtaaatctctcaccgataaaccttgctctgattaccaactgatgtgcacccgttgggtgattgcccgatctttcgatgagagggtgtggaataactcgattgggggaggagacgacgttcacggcccgactacagccttccaaagacgctgcgccttagcaaccgatacaccacctcctatggctgtcacgatcttgtggagcgtgacaccctggccactagggcactcgtcctgcaagcaatcgaaganctagcagaacaagtagaccaagtactgaattaccagatctaaatgtaggtttaaaaatcaaactccaatatggtgggttccgaagacaagaagacgggcggctgaactagcacgcgcgcttgcaagcaagtagcgagagctaaacttgatctaaacaaaacccgctgttcttggtggcggctagggagtttataaacatgggaggacgaccacaagggtattggggtcgtgctgcaaccctaggatgcgtccctaatggacctaacttgatatacgacccattgggccaaaatagggtgacgcagcaccatgggcagaaaaggcaggaaatgtctcggtaagaaaacaatgattacggcggcctcagaacagatatgactataattccggatccatatgaaagtagacttgataagctttccatgttgtgcttgaacattccaatccgagcccgcatctgaccgtggtgaccgtcacaagttggtgttcttctgcagtccgaatccagcatgttcaaatccttttccctttcggtcttctccctgattcctaagcaaaacaagagtgcacgggtctccatggtctaaatatgatggacatgaactcaagagtgtaatcacctgatggttgagttgacgagcacgagcgcgagtaatgggaccagaaattggtacttgtattggtatagatgcatcagtagtgtggatgtcttcatcatggagactgttctccggacggcgcaccaagcaggtcgcctcccagcggtccgggtagaccccgcgactatgctggtagaccacacagcaatactcgatggaccaagtacgccggttaagtgcccgacgtagtagggtgtcgagcgcatcgtggaagtgacacccgcgagcagcgtcgcgagtgatgggtcgagcaatccatccttccggctcctggtcagtagagaagtcggtgtcgtggctcgagctgtcgtcgccacctccgtcgtctgggtctcctcccgcagctactccagaggctggngcacccagtggtggtgcagggngcgcctccagggaagcacangggagctgctcctcacggactctatctcctggtggagcgagaaagagagccctgctgctcctgtcgtcgacgttcctgctcctcatgcaggcggtggtgcagtctctccaagtggctggactgtcccgccacgggacggcaaaacggagcctcaccaaggcggagggtaaaaagggatgacggacttttctgcagggggctaaattcaaccgtctcacaaaaacaccgcaggaaaagatggggaacggattattttggccacaggttatggccccaaata

SEQ ID NO: 367 - DNA, 4471 bp, Zea mays
  source (0)...(0): Zea mays BAC clone full insert sequence contig bacm.pk147.d02.fis44
  misc_feature (1)...(4471): n = A,T,C or G
gggcggattccaattgcgtggcgacggatcgtaaccttaacgtgagatcattcttcacatagaaccattctgtcatccagtctccgggccatctcttccgaaaggttggcacggggcagcttgacccggaccgagaaacgaaactgtagcagccaaaattattgtgatactgttccttaccccaaggttttgtttcatatgataattcatgtatattgcagaagctttttgcgtcaggcttcagaccttggcttctcacggcccacacgaagatattcaaccttataattgcctcgggggtaagttgatgaagatagatttcaaacattttcagcacctctacaacgaagctgctcaaaggaaatcgcagcccagctttcaaaaagcttcggtacactacgacttcattctcttcagggtgtggacaagtcttctccccttcgtcgaccctcactacggacaaatcccggaaataccttcctctcatgttgacaagatgattctctttgatagttgatttaccataaactgaatggcttggtcgccagggacgatcttcggagtcttcaccaccgctgtccacatcataactgtcgctgtcaccagtatcctcagacaaaccttctagaatctccttggtgattttttctgtgttggtcttcgacattgctataagaaaccccagatttttctcttcatcgagactcagtttcatctcggtaacagccttcttatcttcagacatcttcggagacactgaaaaactgttttcaaagccgaagcttcaaaactaagaactcagcaaatcttagtgcacaagagctaaaaattgagtgagcgggagcagatagccagagagcgtgccaaatgagtttgcggtatgaccgtatttatacgcccagtgcgttggaaattgaaagaccccgcttgtcagtgaatgttgctattctagcaaagggaaggtgttttttcagaccttcggcgtaaagccttcgtccatgtcgcaatctaaatttattattttaaacaaattaatattgcgaggggctactgttgggggccttcggcttccgaaggtcctcaaaaacaggatttaacagtatttctggagtatagtgtgtgaacaggtatcttcggactcaagtcagcatcacagcagaccagaataatacgaaggttgatacagcgccgaaggtgtgagcaggaaagcttcggcgtggcagcaaaaaatgaaaccgacttaaagatgaaaaggctattcagacctcgatagattactatagaattattatcaaatgtaaagggcataaatgtaattttgtatgggctgtgtcctgtgtctataaataggtgaacagtacccccgtactgttcacgctgattgggcattcgcttttgcgtcacgcttgtactttcatctccttcaagttgaaggtacatttgtaatcgaacgttatttctgtttatacatgatagtaatatataattgtctatgttgtcctttatattccttatgattcatccttcgtcattgtataatgtatttatgaaggtacgcccttcataaccttcgtccgaaaaccattatatcctaaagggaataatgcttcgaaggatgaaggattttgccgattaacattttctatgttgccttgttcttaactcatagcatttgagagcaagtcaccaacacactccgtccccaccgccggggtacatcgtgagcttcgtctccttccacgagcggggatttggtgtgccagcgagccgctttatgcgggcgatcctgcaccattacggggtggagttgcacaacctcagccccaactccatctcgcaggccgccatcttcgtagcggtgtgcgaggggtacttggggatcgccccccactgggatttgtggacccatctctttttcgtggagcttttcgcttcgccgacgggngagagaaaggtccgtgcggcagtgcgggccagcggctgcatccctcagctgaagcagtcgcgggccgtcgctgtatattcccgcccattcctccgcgtcctcgaacaaggggtggcaccgccggtggttctacctccggaatgaaggcgagttgctcccgccgttctcatagcgagtagtcactgtcgccgccgatgcttggcgctaagggaccccgcacgaaagacagaagaacctcgaaccccttctcaaggccttggaggcgttgcggaaggggggactcaccgccgcgggagtgattgccgccatctaccgtcggagggtgcttcccttggcggagcgacggttgccgctttgggagatgacaccggaggttgacttggagggctcgcggatgtcctcggatccccttcccttcgacgtcctccacgggcgggtggccgtcgcgttggggaaaccggaccccagcgccttctcccagcctttgatgcgccctgaccaagggcgcgtgactctggtgagtgtccactccttccttcctcttgtatcgggttgcccctggtttttacggtcgggatttccatccatcttcaggaggtagggtggcacaagccttccctgccacgggtcccgcaggatgcggtggaccgagcagcgcggcgggttgccgcggaggagaagaagaaaaagaaggacgcggagaaggcccgggcccgcgagcggatgcgggctcaagacgccttggaaaagctctgtcgtcggcaggagagggaggggctcccaagggagccgtcgccggaaacgcctgatgacaacgacgatgatgaagatgatgacgagggagacgacatggctgcccgccttggtctcagccctggcttgaggctaggtcaggagctgtcaagccagcccccgagcgggctgatgccgtcagtccccggagtcgggacgccggggtcccggcccgaagagcgggggcagtctgagagggtgatgtagctgaggtgcccgatctttcggcgagtagagataattccgatttggcggaagatgacccttgcgatccgactacgacgagcaagcctgaggcgccaatgcaatcgctgaaccaactccctatggttaccgaccttgctgatgcgagatcggcctgatcacgaagatcgtttcctgtgcgcaatcgaagaacgaacaagaaaaagatgcgagcaatctaatctattactcgagggtggagttctgaatacacgaagacagcgcagatttgcgcgtgttcgagagtagctaaggctaacgtaaaacaaaactcaaaaataaaggaggcgcagctcctggataaatagagggggcgcagcccctaggggcggccaaacctaggtcgtccactatgggccgcagttgggctggtcgtctattcttctgggccctcattcttcagtagcatgacaaagttaagatctctggcatgggcccgagtgattggcccagctaatgaaggaagtggcgcttgatgtggaggtgctgctggtgtagtcgtactcatagtgatgtcctcatcatcctccccttcttgaagtgaagtcgtcctcgacgacaactcctcatcctcggccatatatggtttcaaatctgcaacattaaaactagtggaaacaccaaattccgcaggcaggtcaaggatataagcattatcattaatctttgttagcaccttaaaaggaccagcagcacgaggcattaatttagaacggcgtaaagtaggaaaccaatcctttctcaagtgcaaccaaaccatatcacctggctcaaaagtaacatgttttcttcctttactaccagcaacctgattttttgcattagtagcagcaatgttctgtttcgtttgttcatgtatggtaatcatttgttcaacatgtgcagcagcatctacatgtggggtgttcgcagcattaagtgaaatcaaatcaataggtgccctagggatgtaaccataaacaatctggaaagggcacatctttgtagaagaatgcgtggcatgattgtaagcaaattcaacatgaggcaagcaatcctcccaacgtctcaaattcttgtctaaaacagccctaagcatggtagataaagttctatttactacctcagtttgtccatcagtctgagggtgacaagtagtgctaaacaacaatttagttcccaatttattccaaagagatctccaaaaatggcttagaaacttagcatcgcgatcagagactattgttttttggaatacatgtaaacgaataatttctctnaagaacatttcagcacatgctagcatcatcagtttatgacaggtataagtgagcattttagagatctatcacnaccacaaatactatccntcactctaggcagcaaaacaagtcataggatatcagccaggaaaaagggcagcaaggcatatcaacatgcttgtcaacggactactttcgaagtagtgactgcaaagcgctaaatagcggatcgagcaaagatgcagcacac

SEQ ID NO: 368 - DNA, 4186 bp, Zea mays
  source (0)...(0): Zea mays BAC clone full insert sequence contig bacm.pk147.d02.fis45
  misc_feature (1)...(4186): n = A,T,C or G
acgccatggtccatcttttttaggcactaaaataaccggaacagcacacggactaagagactcacgcacgtaacctttgtcgagtagttcttgcacttgtcgctgaatttcttttgtttcctctggatttgtcctatatggcgcacgattcggcaaagatgcaccaggaataagatcaatttggtgctcaatccctcgtataggtggcagcccctctggtatctcacttggaaatacatcagaatactcctgcaaaatgttagtaataacaggaggcaaagaatgctgcatatcttgaattgaaatcaaagcatccttgcataccaaggcgtaggcaacagtagtggaagcaaataattcattaacatcagtttttgttgcaagcaagcaatgtcctttcaattttatcccatctttgttattaccaacagctttaatattcttgttgttctcagttttagctttggtagctttagcaacatcatcacgcacaatagcctcaggggacatgggaagcaaaataattttcttatcatggtgtatgagagaatattgatttgatctaccatgatgcatacaatctgaatcaaattgccatggtctacctagcagaatattacaagcatccataggcacaacatcacagtcaacaacatcacgatatgaaccaatagcaaaattaattcgtaccaacttggttaccttgaccttaccactattgttgagccattgaatgtgatatggatgtgggtgcggtttggtcgtaagtgcaagcttctccaccatgtcgctgctagccaagttgttgcagctacctccatcaatgatcaaacgacatgaacgctccttaatgacacactttgtttgaaacaatgtatgtcgctgattctgctctgccttctccatttgtgcactaagcacacgctgtacaatgaggctctcataatgctctgcatcatctgcaccaatctgttcttcgggtggttccttagtgcctgcatcatcagccgcaagcaaagcaagtgtagcttcatccaaatcactagcagaagaatacccaccatcgtcttttaccaccaaaacacgctgattaggacaatcacgctgcacgtgtccatagcccttgcatcgataacacagaacatctcttgttctacccgtggaggctactgaagaggcactacctgctggtttctgggcagatttggttgctgaatttgtggaagatgcacgtggtttgtcgccggaggaaggcgggggtgctggtcgacttggcgagggagttggtgctagtgtacgaccggtcatggacgtagtcgtgcgctgttgccatggtgtagattttcctgcagaaacattagaccttgcactagcacgtcgtccctgcacttccctttcagctttgcaagcaagatgaaacaatcgggttacattagcataatctttataagcaaggatgtcctgaatttccctatttaacccgcccaaaaatctagccatagcagattcctcaccctcctctatgttacaacgcagcatacccatttgtaattcctgataatattcttctacacttttagtaccctgtctcaattgttgcaacttgtttaacatatcacgtgcataataagaaggaagaaatctagcccgcatgacccgtttcaacgcatcccaagtttgtggcatgttattaggattcttcttaccatgttctatccaccaaacagaagcaaattcagtaaactcactagtagcagctctaacccgcgcattctcaggaaattcatggcatgcaaacttttgatcaaccgcaatctcccaagtaatgtaagcatcagggtcatatttaccatcaaaaggaggtattttaaatttaaccttactaaaagcatcatcattaccatgtacctcacgtcggcgaaaaccactcatacctctacggttagtacgtagtcgccggcgattaggtgcttcttggtcatcttgttcagtatcagcaacatagtcatcccagttacctccggcgccctcatcacgcccaccattgatattagcatgcatctcatcaaaccgcctcaagagtgcgacaaggctcttgtcaatatgagcaactgtcatttccacatttgcaagtttggtgttcgtgtcgatctgtgtggcctccaattgccccatcttttcattcgtcacctgcatgtcattatcaagaccttccgtgtgcgtcttcactagccttacaaagtgttgtatgatacccttggtgcgaggagagtgtggcatattacgagaagcatcatcaacctccaatcctgccatggttagacgaacagaggcaacaagaaaaaaaaaacgtgaaggaataaaaactctacaactattaggatgtagctactgcaaggcgctcactctcaacctgccacacaagctcttaccaattcttaccttgcacaacaggaggggtcagcaaccaacaagtctgcaaccgtggaataagtgtatcggtgccgcagcaacacgacctgtcaaactgtagtcgaaatatgtagagttgtaggtgggctgaagcaaggaatacactagtaccacgttagttacaaaagcaagctgaataatcgttcaacggtggtactgtgctggtcctaggctaaaccaggctagagacgtgagcctaggcacaaaggtagtcactgaaaaagaacaactagcacagcacaaagagaaacaacagatttagagattcagcccccttcttcttcttttccttttttttttcttttctattcttttttttttcttcttcttctgtttttttttgcaggggcctaaaccctttttttcactatgacaacccaaacaataaagatattgctaacaacccctttaaatcagatttaacaaatcttgttaatataggaagtccagaaatctctacgatgattgcggagcgctcagaatgaattttgagataaggtcagatccgttggaaagaagataagataagctttccagattgtatttaaacttccaaatcggatatgatatgtatccgtggtggcaaaaacgaaccagagatgtttttggtgatggtggatctcgtggtgaccaaaacgtggtagaactcaaaactctaaaggaataaactaagaccagcaactcgacacaaccgatgcaaccaaaaactcaacaagccctaactaagtagtactagtaaatgctcaatggtttataggattgcggtaaaactaatctactttttttggctttttctggactataggagataagaaaacagcgaagaaaagtaaatctctcaccgataaaccttgctctgattaccaactgatgtgcacccgttgggtgattgcccgatctttcgatgatgagagggtgtggaataactcgattgggggaggagacgacgttcacggcccgactacagccttccaaagacgctgcgccttagcaaccgatacaccacctcctatggctgtcacgatcttgtggagcgtgacaccctggccactagggcactcgtcctgcaagcaatcgaagaactagcaagaacaagtagaacaagtactgaattaccagatctaaatgtaggtttaaagatcaaactacaatatggtggggttccgaagacaagaagacgggcggctgaactagcacgcgcgcttgcaagcaagtagcgagagctaaacttgatctaaacaaaacccgctgttcttggtggcggctagggggtttataaacatgggaggacgaccacaagggtattggggtcgtgctgcaaccctaggatgcgtccctaatggacctaacttgatacacgacccattgggccaaaatagggtgacgcagcaccatgggcagaaaaggcaggaaatgtctcggtaagaaaacaacttcgggcgcagcatgctgacgccgtccgggaaaagtcgaccgcggacagcaagtgccgcaagctggcggagaaggtggccgccctggagggcgagaggacggacctccggcgccagctggtggaggagaggagggaggctaaccaggccatcgccaaggcgcatgcggaggccaatttggcgcgggtggagggtagtctcgccaaccagcgcgccgaggaatgggangtgcggttcaacgctctgcaggcccgcatggagagggccgaggcctctacgtg

SEQ ID NO: 369 - DNA, 8935 bp, Zea mays
  source (0)...(0): Zea mays BAC clone full insert sequence contig bacm.pk147.d02.fis46
gaggatcgtacccttagatgggtctgtttttcgaaactcaaaaccaggagatccaaatatcaaagttgtgccaaatttacttgaacacgtcctggaaaagtttgaactcaaaccaaattcatttgacacggttttggcgcagtttgacctcgggaccagacattctgacactggcaccttggtgacgctacaactccctgtccctagcctaaaaccgcacgacgtccatacacaaaagacaatgcaaggtcaggtgaacaaatccttcacagcgatcttgcccaaattcacgaagatttgcacccaatcagcgctagaacttgggcagaggcaacgggcacacgtgttcgaccgtggctgacacctccggttcacgcccgttcgcgcaccggcgcctcccagtgcacgcccgcgcgcgctcgccggtccacggccgcccgtgcaccgcgtcgtgcctataaagccgccccaagcctcggccattcatccccgcgtgctctcacatcttgcccaagtcagtgatcaccggaaattgccccgagcacgccgcgccaccgcctgccaagctttcagagcctcggccgccgtggccagctctctccagtcgcgtccaagttgcgccagcgcttcggttagctccgctattggcccgtgaagctttccaagccctcggacctggccgaacttcaccggaagctcgagatcaccctcgccggacttcggtcggccgcccccgcacgtggactgggcactccggtgagccattcttcaattcctcgcgcacaccccttccttgatccctggtgaagctctctgacccgtttgatcggtcaattgtgcccaggataggccggactcctcgccgccgacgagctcccccgcctgcgtacgcggaccggccgactccgaccatccccgacggcgacccgcacatcgtcgtgaccctcaggacctcccctacaccctctgccacctcaccggagcaatctcgccgccggtaagcccctccgccctttcttccgccgcgggtactgtttaatttggggaaaggacctcgggttaggattagaagaatccagggggttttctgagatgtcagtgactcaattgaatagtagcccagggactagtctgtaaggaaaacttaaaacacccgccagggaccccgttgcaaagtagttttccatttaatcatttctgtttaatctttttaataaacagagaactttagaaattcataacttgatgaatacttaaccaaaagttgtcaaaccaattttgctaaattctaaatattatgaactatcaattaaaaatactgaaccctatgttttctgttcaaatttttagagtttaaaatttaatacagaaactgaccaaactttgtttaattaaggaaaatttgttatgcttctgtgctgaacctaagaaaatttgtagatgttcaaaccccatttaagcactgtttaaaaatagtgagaaccccagtattgaaaaatttagtgtagaaatccattaaaagccatttctgcccaaatcttaggaaaatcagaaaggccttagaaattaatgaccaatggatgaaattattttttctagtttgcttaagtgacaaagaacctaggaaaaataaaggaacctctagtccagatcagattcaaagtaaaatgttttatttagcattattccaactagaaatcaattattagaattacaaaactaggcccaaaattgataataaaaatccagtggacttgtaaccaccagaaccccactgcaaaaataatggacaccccaacccatcattttaagtagggtaatcattttaagtagggtaaataaatataacatgataatgagccatagttcaattaaatcatgaatagcccaaaataatgcaataatgggcaaataaaattttgctagatcaataatgagataggccaccagagaaaaatacaaacccattggaaagatgcaaaataatatctattgccaatattttataagaaaggccatttaatcctattaatgcataccacccattcccttaagcaaaaagatgccaaacttcagaatgattgctcttgcgcaaaatagaagctaggaaaaatcagaaatctgttgtttgatatttttcaaatatagtggtagtagaaagcacccctttggctagaaactttagaaaatcctagtaaaataactaataagtattaatggctagaaatttgtaccaagtcatgttatagcatctaaatgccagcaaaaataagtcctagagaagtacctactattaaatgatagttgtagttcaaatcaccccttctaccctaaaatttggtaattttgtccagagaaaactattcactttttgaaccccaaattttgagataaagaattatacaccagtaataagccactgtaatttttacagaagttttggaaatttattaaggcaacttgtagttcaaacccactccaaaaacttaaagagaataaagaaaaggaaaggagaaataaatctcactccaataagtccaacttgaattcttggcaattctcactaaagaccttaaaaagaattcaatggaaccgcaaaaataaacctaccatttaacttagctaaggttgatccaatttaccaagtataccacccaaaagtctcacataagtaaggtttaactccatctaactcaagtagatcatacaacatcaaaagtttaaattactaaagcacatatcatatcatgcttatatcttacgcattgcattcattagattgtaatctcaccgacggagagtacgtgttcatccccgagcaagggactgtccaagaggaagaccagaagcaagctcccgaggctgctatcgaggatctccctgcagccccagctattgaaggcaagccccgatttatatgcataaccgtattattatatgctactttactacacttaatgcttgtaggattgtaatgtgcacttaagtgtaggagttgcttgaaacctctagttgcatgaacttaagattcctttttgagatgaatactactatgctaggtcgagtagctgcttgctaatcaggatctcggtagaagtcgagtgatttttctagcactcgcgcgaggtcaggaattgattgtattcatcttgataacgggatctatgttagtctatggacttggatccagggaggatgccttgaccatgagacgggaaaaaagaattaaggattaatgtgtggatacttgagtcaagcgtttgaacgtactaaccacatgtcgggaaaaatggtaaccgataaacctagtacctgagtgaagccaggcgcgaactttatccctcatgcgacctgagactgggtctcccatgctagctatggtgggtacaagtgcggtcactgcacggcggcagccggggtcagtggagcattgtatgccaaggcggtgaggcctggacgcgaacggggaatcgatggggacggttgacatgtgtggggtcggagtaccctgacatgtcgtgtgtttaggtttaccttgcaaggataaaactcgattcgaatcgtctgcttctcgcagctaatgagactgcttgaccccttatactacatcgagtaagaagtgaaatgaggttacatgagacaatttgttgattgaactaaatgcttgttaccatgtatgcttagaaggagcaaacctagctaaaataatgatactagaatttgaaaagctaagaattgattttagaaacagctagtgcttttggcaaatcaaacccctcagccaaacagctgcatagtctagaggtagaggagtagactcctcataccaggtaagtctagctgagtattagtagttccgtcacagctggtatcggagcgaagcccttctctgcagatattatgaggcatcttcaaaaggattttctaaagacttatctaaaaaatctttttccttcttacctaagtattctgaagagtttatttcaaagaccaggtagtaagagtgcaacatatagaaggtgtgaatcaactaaggttgattctgtaattatacatgcatcatgctaagaactatactaatcaaagtttcccccttagaaaaatgtcgccgcgcacgaggagaactgcgcgcaaacatactggaccgattggtgtgccgtgtcaccagctggccccaagacatgataatagtagtagtggaagaaacgatccgataggggatctcgaagcagaagtaagtcggctccaagcggaactccgccgcaggacggatatatgggtcgcagatggcgaccgaataaatgagttgagaagagacgtccgccatctgcgagattagctcgcggaccgagatttggcactcgactgggttgttcaatctcgttcgcttgcatgggccaaggaggaaacagctcaagctcgagtagccgagctcaacttggccgttgataacctgcagacatattgcaataccttacatgaagaagttcatgtattatattcgcaactgcatcctagtgaacctgcggatcctgtcgagtcggaagccggaccctcgcatgttgcgggagaagtgcttggtggtgagttggacctttttaggccccctccttctatgaggctggtcaatgaatggtctcccacacccgacgacaagactgccaagagcaaccggaagcaggaatagtggtgtagtagtagaaatagaagtagtgtattgtataataggttgtactattgtataataggtagtgctatggtataataggtagtgtatcctgttgtaaaaaattcgagtctgtaacattactctttttggtaatgtaaaatggatggttttttctttggcatgtgatgtagctgaggtgcccgatctttcggcgagtagagataattccgatttggcggaagatgacccttgcgatccgactacgacgagcaagcccgaggcgccaatgcaatcgctgaaccaactccctgtggttaccgaccttgctgatgcgagatcggcctgatcacgaagatcgtttcctgtgcgcaatcgaagaacgaacaagaacaagatgcgagcaatctaatctattactcgagggtggagttctgaatacacgaagacagcgcagatttgcgcgtgttcgagagtagctaaggctaacgtaaaacaaaactcgaaaataaaggagacgcagctcctggataaatagagggggcgcagcccctaggggcggccaaccctaggtcgtccactatgggccgcagttgggctggtcgtctattcttctgggccctcattctttagtagcatgacgaagttaagatctctggcacgggcccgagtgattggcccagctaatgaaggaagtggcgcttgatgtggaggtgctgctggtgtagtcgtactcatagtgatgtcctcatcatcctccccttcttgaagtgaagtcgtcctcgacgacaactcctcatcctcggccatatatggtttcaaatctgcaacattaaaactagtggaaacaccaaattccacaggcaggtcaaggatataagcattatcattaatctttgttagcaccttaaaaggaccagcagcacgaggcattaatttagaacgacgcaaagtaggaaaccgatcctttctcaagtgcaaccaaaccatatcacctggctcaaaagtaacatgttttcttcctttactaccagcaacctgatttttagcattagtagcagcaatgttctgtttcgtttgttcatgtatggtaatcatttgttcaacatgtgcagcagaaaacaaagtccatagagatatcaagccaaggagaagaagggacaggcaaaggcatatacaaaccatggttgttcaaccgtgacttagctttctgacaagtagtgcagcgtgcaacaaggcgctccacatcagcgcgcatccgaggccaaaagaaatgggcagccaacacctcatgcgttttgtagacgccaaaatgccccatgagaccgcctccatgcgcttcctgtaacaacaaaagacgaaccgagctagctggaacacacagcttgttagcgcgaaacaggaacccatcctgtatgtgaaatttgccccatggtatcccattaatacaatggccgaaagcatctttaaaatcagcatcgtcaacatattgatccttcacagtgtccaaaccaaagattttaaaatctaattgtgacagcatggtatagcgacgagacaaagcatcaacaataacattgtccttcccgttcttgtgtttaataatgtaaggaaaggactcaatgaattcgacccatttagcatgacgacggttcagatttgtttgggtacgaatatgttttaaagcctcatgatcagaatgaattatgaactcacgatgccaaagatagtgctgccaagtatgcaaagtgcgcactaaagcgtaaagctccttatcataagtagaatatttcagactagcaccgcttattttttcactaaaataagcaactggttttccttcttgtaacaaaacagcacctagcccaataccgctagcatcgcattcaagctcaaaaacattattaaaatcaggcaattgcaagaggggagcttgggttaacttatctttcaaagtgctgaacgctaccacctgcgaatcactccaagcaaacgacacatctttctttgtaagctcatgtagaggcgctgcaatggagctaaaatcacgaacaaatctgcggtagaaaccggcaagtccaagaaagctccgaatttgtgtgaccgtcgtcggtgtaggccactcccgaatggcagcaatcttgctgctatccacctcaatgccctgcggagtaaccacataaccaagaaacgagacacgttgcgtgcaaaatgtgcacttttccatgttaccaaacaagcgagcagcacgcaaagcataaaaaacagcacgcaaatgtgctaaatgctcctctatagacttgctgtaaataagtatatcatcgaaataaacaacaacaaacaaacctatgaaggcccgtagaacttcgttcattaaacgcataaaggtgctgggagcattagtcaatccaaatagcataaccaaccattcatataaaccaaatttcgttttaaaagccgttttccattcatcaccgagtttcattctaatctgatggtaaccgctacgcaaatcaaccttagagaaaataacgacaccactaagctcatctaacatatcatcaaggcgtggaataggatatcgataacgaactgtgatgttattaatagcacgacaatctacgcacatacgccatgacccatctttctttggaacgagtaaaacaggaaccgagcaagggctaagagactcatgaatgtaacccttatcaagcagcgtctgcacctggcgctggatctccttcgtctcctctggatttgtacggtacggggcgcggttcggaagagaagcgccggggatgagatcgatctgatgctcaatgccacggaggggaggaagacccggtggtatgtccataggataaacatcagcatactcctgcaaaaggttaacaacagcagggggtatatccaaagacggtgcatcatcaagcggaacaagcatgcacgagcatactagtgcataacagggcatatgagcttcatggagatcatcaaaatcagcacgtgtagcaagtaaaataggagagtgcaacttgatttcagatttaataggtgcggctgatgtcgatttgacttgttgtgcagttttagcagccctagtaagatcatctttcaaaatttggtcaggggtcattggatgtataattattttctggcctttaaacatgaaagaataatgatttgaacgaccatgatgtaaactatcagtatcatattgccaaggtcgacctaataacaaagagcatgcttccataggaataacatcgcaatcagcataatcagaataagaacccagcgaaaaggggtaccgaacgtgttacctttattttaccaccatcattaagccattgaatatgatacggatgtggatgtgtgcgagtggactaggataatttctctaccaacgttgtacttgccaaattgttgcagctgccactatcgatgatgatgcgaatcgaccgttcgtgcacgacgcccttggtatggaatagagtgtgtcgctgatttttttcggcctgggcaacctgtgtgctgagaacacgctgcacaacaagactctcatacctatcggcgtcgatgggatcaacgtggacttcctcattttctgcatggttagtggcaatcatagcatgactagtttcctcagaatcactggttgaagagtactcaccattgtcacgtataagcaaggtacgcttgtttgggcagtcccgaatcatgtgcccaaaccctctgcaacgatggcactgaatatcccgtgtacgtcctgtggaagaagcggcgcctttggcagggggcgccactggcttggtcgtccctgtgcgcgatgtagtgctaggcgtagaaggtgcagggctggaaggagttgagctatgtgttggaccccggcctgcaaaagagttagtatatgtctttgatcgtcgtccctgcacttcacgttcagctttgcaagcatattcaaacaatgtggttatatcaaaataatccttataatcaagtatatcctgaatttccctgttcaaaccaccacgaaaacgcgccatagcagcgtcatccgactcaaccaaaccacaacgaagcatacccttttgtaactcctggtaatattcgtcaacagatagtgaaccttgttgaaaacgctgcattttgttaagcaaatcacgagcataataggaaggaacaaatctgtggcgctcttgctgaaagatcccgtcgacctcgcgcgaggttgaatcgcgcacttcgcccgataggagtcgtttcgcc

SEQ ID NO: 370 - DNA, 8592 bp, Zea mays
  source (0)...(0): Zea mays BAC clone full insert sequence contig bacm.pk147.d02.fis47
  misc_feature (1)...(8592): n = A,T,C or G
ctaatttgaatggatggatgtatgtatgcttgcaatcgcatagagaacgatccggttgaagagcccgaggaactcgcaggagaagcccctgagcagcagtcggttggtggaggcaagtgtcccttgacctatctctgtcctattcattctttaattcacctctcactttacacatttatgcctaaggattaactagctttgttatccatgtccttgtttacctatttgggttggattattattgtttagcttcatgctattgcttaactctaatcaatgaacatgatgagattatctatgatacgttgttttcccctctgttattatgatgttatacttgtggtcttcaagggggcttgagcggtttctcgagtgcctctccgtaaggacttgttctatggatgaccgcccgggaaaacagtgcaaccatgagggtggaatggggtgcccttagctgaataattagaggatccggggtgtagttcgcttagccatcgtgccgtcaatggggctcggtgtatgcggctcactctgccaagtttgggttcgccccttgnggaggagtgcggtgcatttaggaaacctaacgggtggctacagccccggggaatctttgtaaaggctacgtagtgatgccctaccagaccacctaggtagtggtcaatggggagtagctctctccgggcagaaagggatcacgacttgtgggtaaagtgcacaacctctgcagagtgtttgaaaactgatatatcagccgtgctcgcggttatgagcggcaagggagctctagtgattagtggtacttgatcagagacactttggtttacaggtggcaatgagactgatgggtttggaaagggtacatcgggctaataacttgggataatgctaaaacctggctttctattagtaaataataatctgaccaactaaaagcaactgcttgacttatccccacataaagctagtccactacagccaaataggatacttgctgagtatgttgatgtgtactcactcttgctctacacaccaaacccccccccatccccaggttgtcagcattgcaaccactgctcaggagaagatgaagccgtggaaggtgatgtagctgaggtgcccgatctttcggcgagtagagataattccgatttggcggaagatgacccttgcgatccgactacgacgagcaagcccgaggcgccaatgcaatcgctaaaccaactccctatggttaccgaccttgctgatgcgagatcggcctgatcacgaagatcgtttcctgtgcgcaatcgaagaacgaacaagaaaaagatgcgagcaatctaatctattactcgagggtggagttctgaatacacgaagacagcgcagatttgcgcgtgttcgagagtagctaaggctaacgtaaaacaaaactcaagaaataaaggaggcgcagctcctggataaatagagagggggcgcagcccctaggggcggccaaccctaggtcgtccattatgggccgcagttgggctggtcgtctattcttccgggccttcgttctttaacagcatgatgtagttcaattctcttgcacgggcccgagtcactggcccaggtggaaggagtggcgcctggactggggaagatggtgcctgggctggagaaggtgctgctggtgtagatgtgctcgtgttggtgttgatgtcctcatcatcctccccttcttgaactgaagtcgtcctcgacggcaactcctcgccttctcccgcatacggtttcaaatctgcaacattaaaactagtggaaacaccaaactccgcaggcaggtcaagggtataagcattatcattaatcttggttagtatcttaaaaggaccagcagcacgaggcatcaatttagaacgacgtaaagtaggaaaacgatcctttctcaaatgcaaccaaaccatatcaccaggttcaaaagtaactagtttccggcctttactaccagtaatctgatatttagcattagcagcagcaatgttttgttgagtttgttcatggagattaatcatttgttcaacatgtgcaagagcatctatgtgtggggcatccgcagcatcaagcgaaaacaaagcaataggcgccctaggaatgtaaccataaacaatttgaaaagggcacatctttgtagaagaatgggttgcatgattataagcaaactcaacatgaggcaagcaatcctcccaacgtttcaaatttttgtctaaaacagccctaagcatggtagacaaagttcgattaactacctcagtttgaccatcagtctgagggtgacaagtggtgctaaacagcaatttagttcccaatttattccacagagatctccaaaaatgactcagaaacttagcatcacgatccgagactattgtattgggaataccgtgcaaacgaataatctctctaaaaaacaattcagcaacattgctagcatcatcagtcttatgacaaggtatgaaatgagccattttggagatcgatcaacaccacaaaatgctatccctccccttcttagttctaggcaatcccaaaacaaaatccatcgaaatatcaatccaaggggaagtaggaacaggcaaaggcatatacaaaccatggttgttcaaccgtgacttagctttctgacaagtagtgcagcgtgcaacaaggcgctcaacatcagcgcgcatccgaggccaaaagaagtgggcagccaacacctcatgtgtcttgtagacgccaaagtgccccatgagaccgcctccatgtgcttcctgtaacaacaaaagacgaaccgagctagctgaaacacacaacttgttagcgcaaaacaggaacccatcctgtatgtgaaatttgccccatggtttcccattaatacaatggccgaaagcatctttaaaatcagcatcatcaacatattgatctttcacagtgtgcaaaccaaagattttaaaatctaactgtgacagcatggtatagcgacgagacaaagcatcagcaataacattgtccttcccattcttgtgtttaataatgtaaggaaaggactcaatgaattctacccatttagcatgacgacggttcagatttgtttgcgtacgaatatgttttaaagcctcatgatcataatggattataaactcacgatgccaaagatagtgctgccatgtatgcaaagtgcgcactaaagcgtaaagctccttatcataagtagaatatttcagactagcatcgcttaatttttcactaaaataagtaactggttttccttcttgtaacaaaacagcacctgcaataggggagcttgggttaacttatctttcaaaaatatttcagactagcatcgcttaatttttcactaaaatatttcagactagcatcgcttaatttttcactagaatatttcaagctcaaacactttattaaaatcaggcaattgcaataggggagcttgggttaacttatctttcaaagtgctgaatgcttcctcctgggaatcactccaagcaaatggcacatatttctttgtaagctcatgtagaggcgctgcaatggagctaaaatcacgaacaaatctgcggtagaaaccggcaagtccaagaaagctccgaatttgtgtgaccgtcgtcggtgtaggccactcccgaatggcagcaatcttgctgctatccacctcaatgccctgtggagtaacaacataaccaagaaacgagacacgtcgtgtacaaaagatgcatttttccatgttagcaaataactgggcagcacgcaatgcatcaaaaacagcacttaaatgttccaaatgctctttcttagatttgctgtaaataagaatatcatcaaaataaacaaccacaaacaatcctatgaagggccttagaacttcattcatcactcgcataaaagtgctgggagcattagtcaatccaaacggcataaccaaccattcatataaaccaaatttcgttttaaaagccgttttccattcatcacccagtttcattctaatctggtggtaaccactacgcaaatcaatcttagtgaaaataatggcaccactaagctcatctagcatatcatcaaggcgtggtataggatatcgataacgaatagtgatgttattaatagcacgacagtctacacacatacgccatgacccatctttcttgggaacaagtaacacaggaacggagcaagggctaagagactcacgaatgtatcccttgtcaagcaacgcctgtacctggcgctgaatctccttcgtctcatccggatttgtacggtacggtgcgcggttcggaagctgtgcgccgggaatgaggtcgatctggtgctcaatgccacgaagtggtgggagacccggtggtaagtctttgggaaagacatcagcatactcctgcaaaaggttagcaaccatagggggaatagccaaagatggtgcatcatcaagtgaaatgaggacactagagcatataagtgcatagcatggcaaatgagcaccgtgtagatcatcaaaatcagcacgtgtagcaagtaaaacaggagccttcaacttgatttcagaaggaacagagggcgatggatctagttgtttagcagttatagcagctcgggcaagatcatctttaacaatttgttcaggtgtcattggatgtataattattttctgacccttaaaaatgaaagaataatgattcgaacgaccatgatgcaagctatcagtatcatattgccaaggtcgaccaagtaacaaagagcatgcttccatgggaataacatcacaatcaacaaaatcagaataagcacccatggagaaaggaacgcgcacggaacgcgtgatttttattttaccaccatcattgagccattgaatgtgatatgggtttggatgcttacgagtgggtaacgataacttttcgaccagcatggtactcgccaaattgttgcaactgccgctgtcgataatgatgcgaattgaccgctcctgcacaacaccctttgtatggaacagagtgtgtcgctgattcttctcgggcaaagcaacctgtgtactaagaacacgctgcacaacaagactttcatacctatcagcgtcgcccgggttgacatgtacctccgcctgagctgcatggttagtggcaagtagtgcatgttcaatttcttcagaatcactagcggaagagtactcaccatcgtcacgaatgagcaaagtgcgcttgtttgggcagtctcgaatcacatggccaaatcctctacagcgatgacactgaatatcccgtgtacgacctgtgggtggggcagtgctggctggtttggtcatcttctcgcgtggagtagtggtggacgtggatggcgcagggggaactggtgctgaggtggatgtcgagcttcgtcctgcaaaagggttagaatatgtcttcgagcggcgtccctgcacttcacgttcaactttgcaagcatattcaaataaagtagtcatatcataatattccttataatcaagtatatcctggatttcgcggtttaaaccaccacgaaaacgtgccatagcagcatcgttgtcctccaatatcccacaaccaatcatacctttttgtaattcctggaaatagtcctcaacagattgagaaccttgctgaaaacgctgcattttattaagcaaatcacgagcataatacgaaggcacaaatcgatgtcgcatcgcagctttcaactgatcccaagtggttggaatggcagtggtatgtttcattttatactcacgccaccaaattaaagcaaaatctgtaaattcacttatagcagctttaacctgagaatgtgcagcaatatcatggcatgaaaatttttgttcaacctctaactcccaatcaagatatgcagcaggatcatatttgccattaaaaggtggaattttaaatttaatcttagaaaataagtcattagggggatgacgaaccacacggcgtgcacgaccacgtcgatctccatcgtcctgctcagtgtcactgccgtagtcctgctccatctttgtggtcaatgcatcaaggcgtgccaggatggtgtcgagtgtggtgcgagtcgccgtttgagcaaggtcaagctggttgaaacgctcggtcgtcgaagtgaccgttgaatcaagccgttcatgcatcgtcctaatgtcagcagcaagtccatcaacttgtccccttacttcctgcaactgggcatctaccatgtcgtgtgctcctgccatagttagcgcaaacaccaaaacaccaaaaggagaaaaaaaccaacgacaaaaacaggggtgtactgctcacaaggcgctcacactagtgctgttatcaagttcttatccgttcttaccaagccacagtggtgaactgtaagcaacaggtggaaccggtgaaagattggatgagcgattgcgtggagaaacagaaacctgctcgtcgtagaaatatgtggagttgtgagtaggctgcactcaagtcaaggattagcacgatcaaacaataatgcaaagttgaattatagtgcaaaacacgaaactatattgctggccacaggtgcaaaggatggatggaactagcagaatggcagtaccgtaaatcttgtactagtgatgccaaaaaggcactagtagaaatcacaggtgattttgtttttcttttttgtatgatttttttgatatttttctcagcacaagaagcaacaagataggagctacacgaagtttcacctaaaacagatatcagatgtggtctacagaaaatcaggaagttctctgaaaagcgtgcgagaactttgacggatttttttctttattttcctgaattttttgacaattttgtcgaacccaaacagaccgaaggtgagtttggccggcctcagaatggtgtcaactagctcctgtaaaaatttcagattttttggacacccgagcgaaaagttatgcccggtttaaggaaggtacctcaagttatgttttcaaacgaccgggatgaaacaaccgtatcctttctccttcgttgttttttgtttctgttttttttttgacgtaaccgaaggagaaaaacaaggaaacgatgttgactcggtttgttttttttctgtttttttttcgtaaccgaaggagaaaaacaaggaaacggccgttgactcggtttgttttttctgttttttttacgtaaccgaaggagaaaaacaaggaaacgatgttgactcggtttgtggcgtgatcaaagggtagatggtggcggcgctagggtttgaatggtggaagaacacaatgcaaccagcaacaaatgacgcgaaagcacacaaattcaacaatgcagattattgaaagaaagtgtgaggctcaatagggtgctgggataagatctaacctgaatttttatgtggttttgtggactgtaggaaaaaaaacgctcgataaactcaccgatcaacctggaactctgataccaattgatgtagctgaggtgcccgatctttcggcgagtagagataattccgatttggcggaagatgacccttgcgatccgactacgacgagcaagcccgaggcgccaatgcaatcgctgaaccaactccctgtggttaccgaccttgctgatgcgagatcggcctgatcacgaagatcgtttcctgtgcgcaatcgaagaacgaacaagaaaaagatgcgagcaatctaatctattactcgagggtggagttctgaatacacgaagacagcgcagatttgcgcgtgttcgagagtagctaaggctaacgtaaaacaaaactcaagaaataaaggaggcgtagctcctggataaatagagagggggcgcagcccctaggggcggccaaccctaggtcgtccattatgggccgtagttgggctggtcgtctattcttccgggccttcgttctttaacagcatgatgtagttcaattctcttgcacgggcccgagtcactggcccaggtggaaggagtggcgcctggactggggaagatggtgcctgggctggagaaggtgctgctggtgtagatgtgctcgtgttggtgttgatgtcctcatcagaaggagacttccaggagttccaagactacgacgagttctaggcgtgggttagcggcaacccccagtcggctgcctgtgaaggccgcgtttatctacgtttcttttccacactttgatttattgtaaggaccatatggacgtctcagacgtatgatgtaatcgactattatttccctttttaatactatttgagcattgtatgatgatgtccatgttatgtaactgctgtgtacgtgaattactgatcctggcacgtacatggttcgcattcggtttgccttctaaaaccgggtgtgagataagtggtatcaaagccaggctgactgtaggaccgctaacctaaaatagaatggtcgttctaaggactatagacctttgtccctgccttgactttgatatcccttcaaaagtggtcatacagaccaaacctattgtctactatattttataccttgctganaatcatgttttattctaatccttcatttatttatggtcattacttggtggtcatat

SEQ ID NO: 371 - DNA, 6439 bp, Zea mays
  source (0)...(0): Zea mays BAC clone full insert sequence contig bacm.pk147.d02.fis48
gaggaagttgagcttgagtcgaggacgactcaaatgcaagaaggggagaatgatgaagacatccacactactgatacatctatgccaatacaagtaccaatttctggtcccattactcgcgctcgtgctcgtcaactcaaccatcaggtgattacactcttgagttcatgttcatcttatttagaccatggagacccgtgcactcttgttttgcttaggaaccagggagaagaccgaaagggaaaaggatttgaacatgctggattcggactgcagaagaacaccaacttgtgacggtcaccacggtcagatgcgggctcggattggaatgttcaagcacaacatggaaagcttatcaaatctactttcatatggatccggaattatagtcatatctgttctgaggccgccgtaatcattgttttcttaccgagatattttctgccttttctgcccatggtgctgcgtcaccctattttggaccaatgggtcgtgtatcaagttaggtccattagggacgcatcctagggttgcagcacgaccccaatacccttgtggtcgtcctcccatgtttatagaccccctagccgccaccaagaacagcgggttttgtttagatcaagtttagctctcgctacttgcttgcaagcgtgcgtgctagttcagccgcccgtcttcttgtcttcggaaccccaccatattggagtttgactttgaaacctacatttagatctggtaattcagtacttgttctacttgttcttgctagttcttcgattgcttgcaggacgagtgccctagtggccagggtgtcacgctccacaagatcgtgacagccataggaggtggtgtatcggttgctaaggcgcagcgtctttggaaggctgtagtcgggccgtgaacgttgtctcctcccccaatcgagttattccacaccctctcatcgaaagatcgggcaatcacccaacgggtgcacatcataggagtccctcggctcagtcggccttgccacttacatgcacccgcgttcgctccttggggtcctgcttccgacatagccggggaacgcaaaagccttttcgattgaaaattttgacgcagaggggttcccccctttttagctcccgagggagggtcgggttctgccaaggcaaggccgacccttccttgacgactaaaacttgtgtgggggcaaggtaagcgaacaacttgaaggcatcttaagggtagaagcaacgtagctgttagacgtttggagtgttggtgcagacctcaccttcactgtcggccagttcatttgttctgggcttcagaactttggcgataacaagcggcccttcccaggggtgggtgtagcccccgggtgtctccaacaagggctcggggtgctgcgcgatggtcacgatcttctccgggttggcttcgatgccccgcttggagacgatgaaccccaagagcatgcctcggggcaccccgaagacacacttttcaggattgagcttgacgcctttcgcctctttgatgaaccctgccgccattagcttgtggatctcctcgcctatggctctgcgcctttcttcgtcgaatcggcgcagaggctgcttgacgggtcgggctccggctcggatgtccagcgagtgctcggtgacgtccctcggtatgccgggcatgtccgagggactccacgcgaagacgtcggcgttcacgcggagaaagtcgaggagcattgtttcctatttgggaccgagctcggagccgatccggatctgcttggaggcgtcgctgctggggtcgagggggacggccttaaccgtctccgctggctcaaagttgccggcatgacgcttcacatctggcacctccttagagaggctctccaggtcggcgatgagggcctcggactcggcgagggccttggcgtactccacgcactccacgtcgcattcgaacgcgtgtttgtacgtggggccgacggtgatgaccccgttggggcccggcatcttgagcttcaggtaggtgtagttggggacgaccatgaacttcgcgtagcatggtcttcccagtaccgcgtggtaggttcctcggaacccgaccacctcgaatgtcagggtctcccttcagaagttggagggtgttccgaagcagacgggaaggtcgagttgtccgaggggctggacgcgtttcccaggaatgatcccatggaagggcgcaacgcctgcccggacggaggacagatcgacacgcaggagcccgagggtctcggcgtagatgatgtcgaggctgctgcctccgtccatgaggaccttggtgagtctgacgtcgccgatgatggggtcgacgacgagcgggtatttccccgggctcggcacatggtcggggtggtcggcttggtcgaaggtgatgggcttgtcggacccgtataggtagactgccgccgccaccttcaccgcacagacctcccggcgctcttgcttgcggtgccgagccgaggcgttcgccgcttgcccaccgtagatcatgaagcagtcgcggacctcggggaactctcctgcctggtgatcttcctttttgtcgtcgtcgcgggccctgccaccctccgcgggtggcccggccctatggaagtggcgccgaagcatgacgcactcctcaagggtgtgcttgacgggcccctggtgataggggcacggctccttgagcatcttgtcgaagaggttggcacctccggggggtttccgagggttcttgtactcggcggcggcgacaaggtccgcgtcggcggcgtcgcgtttcgcttgcgacttcttcttgcccttcttcttggcgccacgctgagttgacgcctcgggggcatcttccgatgggcggccctggggctgcttgtccttccggaagatagcctcgaccgcctcgtggccggaggcgaacttggtggcgatgtccatcagctcgctcgccctggtggggtcttgcgacccagcttgctcaccaggtcgcggcaggtggtgccagcgaggaacgcgccgatgacatccgagtcggtgatgttgggcggctcggtgcgctgcttcgagaatcgctggatgtagtcccggagagactctcccggctgctgtcggcagcttcggaggtcccaggaattcccggggcgcacgtacgtgccctggaagttgccggcgaaagcttggactaggtcgtcccagttggagatctgccccggaggcaggtgctccaaccaggcgcgggcggtgtcggagagaaagaaggggaggttgcggatgatgaggttgtcatcgtccgttccacccagttggcaggccagacggtagtccgctagccacagttccggtctcgtctcccccgagtactttgtgatagttgtcgggggtcggaaccgggtcgggaacggcgcccgtcgtatggcccggctgaaggcctgcggaccgggtggttcgggcgagggactccgatcctccccgctgtcgtagcgtcccccacgcctggggtggtagcctcggcgcaccctctcgtcgaggtgggcccgacggtcgcggtgatgttgctcgttgccgaggcgacccggggccgcaggcgctgtgttgcgcgtgcgcccggtgtagatcgaggcttcccgcatgaattgggaagtcgcgacatgaggttccgaggggtacccctgccttcgggaggtagagctctcggcccgtcggaccgcggcgccttccaggagattcttgagctctccctggattcgccgccccttggtggttgatggctccggcatcgcgcggaggagcattgctgctgcagccaggttctggccaaccccactagatgcgggtggcggcctgaccctgacatcgtcggcgatgcggtgctggaagccctggggtagatgacgtatttttctggccggaggttgggccgcccatgcctgtccgacgtcccggcggatcggctcaagcgctcctgctccctcgtcgagcctggcctgcaccccgcggatttgctcgagctgtgggtcatggccccccgcctgaacggggaccacagctagctcccgtgggatgtcaacgcgaggcaccgacctaggagatcaccgtcctccagcatgccgagatggttgccttcggagggaccccctagatcgacgtggaaacatttgcggcttgggccgcagtcctcgtcgccgaggctacggctaccgtcggaacagtcggaagggcagtagtcgcatgcggtcatgaagtcccgcatggcactggggttgccaagtccagagaaatcccaacagaagctgggctcgtcgtcttcctcggacccagagggcccgtaggtcgagacgtccgtcagccggtcccaaggtgaccgcatacgaaaccccagagggtttggactcgcctctacgagagcgcccaccaaagcgaagccgctaggcgggtcgaggctgaatccgaaagtcgtgggatgggaatcggtcggtacctcttggtcgacgggcggtgatgaagtcaagtcggggactgactgcaccgtcgtctcaggtacgagggtgacgtccagcaagcctttcgcgagcgcgctggcgtcgtccgtctgcccggaatcggcgcgttgcggggagacggcgctcgtcttcgtctcaagcgcgaggtcgatgcccggtgcgccccccgttggggtgctggtgctatcgactcgctcgacagccgacgaggcgccgcctcctgcttggccttggttgccccgccttcccctccgtcggcggggaagagggcggggtgagctcgatggttgttcttccaccacgcggggaagacgtcgtcgattccgccgccggcgggcaggctgtcggccgccattgtcgctgtcgcccggcggtggaatgagtatcatgtcgtagctgccgtcgagggacatgtactcaagactcccgaaacggagcaccgtcccgggttggagaggttgctggagactgcccatctgaagcttgacatgaagctgttcgtcaacacgcagcaggcccctacctggcgcgccaactatcggcttttcgagaccgggggatccctaagccgacgagtgaaatgtcgccgcatgccccagcctagatgggtcggcgcgaggctgagcgcgaaggggggaagtgaggcggccggagacaggcgtgagagaggtggaaatcctgcggccttcgtgttcgtcccgcgcccaggtcaggtgcgcttgcagtagggggttacaagcgtccacgcgggagagggagcgaggggcctcacgcgagcgcctgtctcgtcctcgtccccgcgcggccaaccctctctaagagggccctggtccttccttttataggcgtaaggagaggatccaggtgtacaatgggggtgtagcggagtgctacgtgtctagcggaggagacctagcgccctaagtacatgccgttgtggcagccggagagattttggcacccagctggtgtgatgtcgtggccgtcggaggagtgctggagcctggcaaagggacagctgtcggagctgttgagtccttgctgacgtcctcttgcttccgtaagggggctgagagccgccgtcgtcacagagtatgcggggcgccatcattgcccatctggcggagcgagccagatgggacgccggtcttgttccccgtggcccgagtcagctcggggtagggtgatgatggcgccacctgctagacgtggctggtctgtgccctaggttgggcgatgtggaagctcctccgaagccgaggtcgagtctgtcttccgtggccgaggtcgagtccgagcccctggttcgggcgaggcggagaccgtcggctgaggctagggcggagtccgaccctggggtcgggcggagcggagttcgtcgtcttctggggctgagtccaagtccgagccctgggtcgggcggagcggagttcgccgtcttctagggcttagcccgagtccgagccctgggtcgggcggagcggagttcgccgtcttccggggcttagcccgagtccgagccctgggtcgggcggagcggagttcgccgtcttccggggcttagcccgagtccgagccctgggtcgggcggagcggagttcgccgtcttccgaggcttagcccgagtccgagccctaggtcgggcggagcggagttcgccgtcttccggggcttagaccgagtccgagccctgggtcaggcgaagcggagcttcctatggtgcctgcggtcgagcctgactgcctgtcagcctcactctgtcaggtggcaccgcagtcggagcggcgcaggcggcgctgtctttctgtcaggccggtcagtggagcggcgaagtgacggcggtcacttcggctctgtcggctgaagggcgcgtgtcaggataaaggcgtcaggctgcctttgcattaaatgctcctgcgatttggtcggtcggtg

SEQ ID NO: 372 - DNA, 10941 bp, Zea mays
  source (0)...(0): Zea mays BAC clone full insert sequence contig bacm.pk147.d02.fis49
gcacgaagtagtatggaggacctgcttcggctgaccctgccgcgcctcggcttcagcaatttccttttgcttctggattgtaacctggcacgaccatgttgtgtggcccttgtccttgccacagaagaggtagtacaatttcctgggttgattgctgaaccttcctccattgaagcttcttcctcctctgcctctcggagctagtggtctgtaaggagtttgctgcatgctcgaagactgtgagatatgatggctgctttgagcattattggccctttcatcgttagcattggagttatggattgacctgacatgcctgggatgaagtcttcctccgaagcccctggtcatttcagaaaacatgtatgcttcctcccttctttggcggaaatcattatcagcttggatgtactcatccatcttctgaagaatcttctccagggtttgtgggggcttcctcgcaaaatattgggctgtaggtcctggccaaagccccttgatcttggcctcaatgacaatttcattgggcactgtaggcgcttgtgctctcaaacgcagaaaccttcaaacatacgccttaaggtactcctcgtggtcttgcatgcattgaaacaaagcctgagcagtgactagcttcatctgaaaaccttggaagctagtgactagcatgtccttgagcttctgcaatgatgtgattgttcctggccaaagggaggaatactaggtctgggccacgcttctgattgacaaaggactttgccatgatagcagcgttgcccccatacgaggatattgttgccttgtaactcatcagaaattgctttggatccaagtgcccatcatacatgggcaactgtggtggcttgtagaattgtggccatggggtagcctgcaattctgctgccagaggagaaacatcaccaaaagtaaagttaccatgatgaaagtcatcgtagtaccattcatctttgttgaatgagctctcctgacgtagctccgtgtgttgaggccttcgatcctggtcatcttgagtaagatgatgcatctcctcaatggcttcgtcaatcttcttctgaatatcagccaggcgaagcatcttctcctttttcctttgcacttgttgatggattgcttctaaatccctgatttcctagtcaagctgctcctcctgaagagttgggctggtagcctttctcttttggctcctggcctatcgcagggagaggcgtcctgatttgtgtccagtggctgaagggcagcctctggcatcgttgccttcttcggcagcatgtcgaaggttgatgcttgccgaaggttgtggaagtgagttcaccagaggtgggcaccaatgttggtcacttgttctcaaattctgtgagctaagaacaaggcaacacaattgttaattgttaaggaccttcgtccctcaaagcattatctccttactggtataatgcttcttggacgaaggtcaagaaggacacaccttcataatattaatacaagggtaagaatgcgaagaaatgaatatgatagtcatattatactaattcatttattccttcattcataaaacatatatgaatataaataatgttaattttacattgatacctttgacttgcttgaatgcgagaatgcgagagagtgaatacaatccagcgtgaacagtacggtgctactgttcatctatttataggcaaaggacgcagaccgggcaaaagtacatttatgtccttaaggtttacacatgatcataatacaaattataaaggactaagtagtcttttcttcgttcggctgttatcaatatccttctgctttattgtgagctgaagcttttccgtctggcaatagcttcggcgtttgctcttatcttctttgaatccatcttcatcttctagagacgaagcttcctataatagcttatgctaaaaacaagtagttaattatgtttttgaggaccttcgaaaggacaagtcccccaacaatatccctagaggtatgaaggcagaagtcattattgcatttgtggaaatttacattgatatgttattattgagattctcctctttgtgatttgggaactaggtgtttggtacattgtattcttgctgttctctaatatttaagaagggacttgtgaactccgtggttggtaaaacattgtagttacgtgtaacaccctgaatttgggggtataaaatttctttctatttatcaaccaaattcaggtgttactcttctctctctctctctagtttctctctctccttttctttttgtagaattagcttgattagtaagggattatttatttgattttgtcaaaaccatatgagtcatgaaatgttgcatcatgttgagctccaaatattctttgaattgttgcacatgtttgacttaatttgaatttgaaacttggtttgaatttgaattgaaaaccctagataaaataaatagaaaagacattagaaattccctgaaatagaaaaggcaaatgtggcccagttagcccaagtcggcccagctggtgcgcgcgcccgagcgccagcccgcgctgataggcggaccccgcctgtcggcctgtctcacccgcgcgctctctcccctctctccctcccgctgcccagtgagccagtcttgtcggcaccgttcctctcgcacgcggccactctctctccgctctctctctctgtcccgcgaaccccaccggtcagtccgtccccaacctcccgcccacgtccctcgcagtggacgcgcccatgaccgcgcgttctctggccacctccgcacgtcctcgcccctttttgagccccgcgccccgctcactcacttgccccagctcacttgcgccctcaactgaaccccatcgccccctctctcaccctgcgcacgcgaccagacaagctctgtcgccgctcaccgaagaccgccgcagttccgcgagcgtcgttgagtccccatcacgttcgtggcctcggtaagcaccgccgcatcacccgcaacttgggacatccttcggtttgccttttccctccctggtttgctcggtctgcgctcaccggagcacttcttgcacagccggagcccgccgccgtcgacccgaggctccaccgcaccgccgccgtccccaagcactctagagtttgcactcgaggtgagcaaccttcccatgcccttaattcgtctgttactgtccttttgcctgcgcaattcctcaccggagttgatccgcgccgccgttagcccgcctcaccgtgtcccgcgctctctggtgctcctacgccggcgtggtgcacacggtcgggttcgccagatcgccctgagcgcgctcgagctatttcccaaacccctagagccccgttgtggccatccccctcgtctccggcgagacctcgccgtggagccgagcggcgcagccctcatccgtaaaaccttctcggcgtcgatctccaccgttcgatcctaatctcgcgatccagatcactggatatcggttcgcacctgcgcgccctgtccccgggcccgccagtcagcgcctacgcccctggcgttgggcccgaccggtcagcccgttgttggggcgaaggcgaagacgccacccttcgctcgatgccttcgccaacctcgctgcactcacggagacaagacgactggcagacttacccttcgtcccacgcgtcgccggacgaagacctgtgacgaggtcgtctcatctcgcggcctcgtccaacatggaggcccacgtgtgatccggcccattgtaacaggccctacgtggccgctgcgcattacgggcctaatttgtaaaggtctccctgtaattacagtctgtaaccctgctttatgggaatattccggggataatctaggcgcctgagggcacatgcgtccttaactcaggacgttgggcactcagatacctataaatacccccgcacagtgcccttgagaggctagattaacagagcttttgccatctcgaattgaaaccttgtttacgttgcccccactcccccgttggatcaacttgctcgggagagcaagttccaacatttggcgcccaccgtggggctcgaacccacgaccttgctgacctcgccgaaacgtttgcgaacatgcgggacgcacgacttcgcctaaaccccgaaaagtgcgtcttcggcgttcgccaggggaaaatattgggctacctggtgtcacaccacggaatcgaggccaacccaaccaaaattcaggccatcatcaacatgacgcccccgcagtcagccagagacgtccaacgcctgacaggcagattggccgccctcaacagattcatctccaaatccgcagagcgaagtctccctttcctcaaaactctccgcggcgcaaaagacttcgcttggggaccagagcaggcggcgtccttcgccttattgaagcagtacctgttggaattggcgatttttacaagccccgactcctcgctacccctgttgctctatgttgcggcttcgccacatgcggttagcgcagcattggttcaagagcagaccacagagggcatgatcaggcaatgtctagtttattacgtctccgaagtgctcacaccatcaaaatgtaatatgacggaactggaaaagattgcctatgcagttgttatggcttcgcgcaaattgcgccactatttcgaggcattcaaggtctgggtcacctcagataggggactcggcgaattgtttagaaacccggaggcatcagtccggatcgccaaatgggcagccgaacttttcggctaccacatcacatttgaacccagggcagccatcaagtcacaagtcctggctgacttcgtcgtcgactggactgggccaacaacacaaccagacccgtctacagaaaaagtatggacaatccattgcgacggcgcatggtgccatgcgggggcaggcgccgctgcagtcattacttcacccacaggggtcaagcacagatacgcagcacgcctcagctttgccttggagtctgacagatgcactaacaacatagcagaatacgaagctgtcatcctcggccttcgcaagctaagggcccttggtgtcaccacctgcatcatcagaacagactccaaggtagtcaccggccaagtcgagaaagactacacaacgaaggaccccgcactcatgcagtacctcgcagctatccatagtctcgagagacaattcaaaggtttcaccttgtagcatgtgggtcgtgccaagaatgaggaggccgacgcgttggccaaggcagccgctagaggcgaggccctgccctccgacgtattctaccatgtcatcggcacgccagccgtccgcagcccagaggggctccaaataaccaatgacagcgagggccaccgcatagtcaaccttatcatgaccgaagactggcgggcaccaataaccctcttcttgcaggggtactatcatccaaccgacatcaatgaagccaagcgtctcaaacatcgaagccgggacttcgcactaatcgaaggacagctttacaagaagggagtcattcaacccatgcttaatgtgtcaccgagatcgaaggcgtccaaatcctacgcgaagtccacagcgggacctgcggctctcacgcagggcctagggcactagccgcaaaagtaatccgtcaaggtttttactggcccgccatgatctacaccgcaaatcgggtcacaaggtcctgtgaagcctgccagaaattttctccacgatcgggaagcccttcgcagttcacgaagctcatcgctcacacatggcctcttcagcgctagggcctggacatcgtcgggcccctacccacggcccaggggaacctcaagttcaccttcgtcgctgtcgaatactttaccaaatggatcgaggcgagggttgtatccacaataacatcgaagactgcccagaaattcttctgacaaaacattgtttgccgcttcggagtcccatccgaactcacagttgacaatggcaagcaatttgacagccaagacttcaaggatttctgcttctccattggcaccaagcttgcctttgcctcagtataccacccgcaatccaacggagttgtggaacgcgcaaatggcaaaattttcacagctgtcaagaagatgctcctcgacgataaaaagggaaagtgggccgatttgttacctgaagcggtctaggcattaaacacgactgagtgcagggtgactgggttcacccctttctgcctcctatatggatcagaggccatgaccccacaagaaataaaacatgggtcaccacggacagtcccgtcagccgtccccgacgtggacgagcccacttcgaaggacctcatcgacggagaccgcgtcttcgccatacaggctttaaacaaataccaagcccaaacaaaagcatggcgcgaccacacagtcatcccgagggaattcagcgaaggagacctcgtacttgtccggacagctcggacagagtccgggggcaagctcgagcccaagtgggagggccctttcatcgtcaagacgaaggcgtcccccagcgcgtacaggctcacaacgccatccggcgagaacctggagcattcttggaacattgataatctccacaaattttttgtttgactcctcagggccagctcgcccttgtaattcgcaaaacaattttattctggcccacactcttttcctcccagtgggtgaggtttttaacgaggcggagccatgtaatataccagcgaaaaatcccccgcaaaaatctacgtcgaaaaaagaccgcatcgacggtcttcgacattcgaccaatacaaagtcaccgtgaggggcagcgctagctaccctcgcgtgcgagaatccgagcaaaagtcgcctaagggtgcagccggactagcacaacaagtgcgcaaaatcgaagtcttcttcaaaagactatccgtgcaaaagccacctaatggtgcagccggactagcacaacaagtgcgcaaaatcgaagtcttcctcaaaagactatccgtgcaaaagtcgcctaagagtgcagccggactaattcaacaagcgcgccaaaacgcaagcgcattacatccatgcaaaagtctacaccaagaaactatccacgcacagaccaactacaggcgtagccggaccaacataataaatgtgccagaccaagcgtgcaacgcccctatggacatagccggatgcgcgaaggcgcacaacctcatcatacaaactatagtaacacacgtacagcgagggcatcacaccttacattggttcaactttcagaatgattcccatctccctatagttaaatagcattattctaagctcctcaccctcaaaaagacttcacaactccccctcacctacactcgccccagccggcgaggacaacaattcttgcttgccagccctgcccacacgaagccgatcgccatccacttcacccactctacgcttcgccaccgcccttcgccgcctacgcccagcactcggaccaggcacaacttcagcatctgcaacacgcggaaaagcctccgccgcagccacatccaaggccgcaaagtaatccaagtcctcatccgacgactcttccgtccactcaaccgaactcctagagtcaccgaaatcagaaaatttagacgcagactcatccgattcattcccagcatcccacggtcaaagccgccacaaaattagcagtagcggttgcgtgcgcaggcccaaaatcctgaacctgcgcagcaaccaaggttcagcaacatagacaaaattctctaactaccccacacccactaagccacctgcgaagacccagccgccgccatgggatcctccgctgccggctccgtcgccgccttcgggggatcctccaccctcggcacagcggttggcgacgagccaccaccggacacagtagctgcaggggcagcgagggagccttcaccgatttccgggggcggtgccgggtcgacctcagcctcagccaccaccgggttggcctccgcttcgggccgcacgctgttcaggggtccgaagtcctccatgtcctcggcacgcgccgcctacaacacagcacaccgattcagcaagcccacgcataccccacattcaaacaacactaaacaaaagacaaactttacctgatccatcgcccggtcggaccgctccctcaccacctcccgaccgtgggggccccacatccggtcaaagagggcacccgcggagtccttcaccatagggtcttcgaccttgaaaatctcgcgcccaaaatcttcatcagatcggtcgaagacctcatagtgtctgcatccctcgcgggacagcgcgttcatcgccccttcgcaggtgacgagggaggcaaaggacataaatccctccacaatggtcgggagcgccaacagttcctcttgcagccactcgaggaagcgaaggcccacctcccggtcgggcacttcgaagtcagcagtccgcgcgcccagctcgcggtatgagtccacgagctgtttgcgcgtccgctcaacttccgagcacgtagaggcctcggccctctccatgcgggcctgcagagcgttgaaccgcacctcccattcctcggcgcgctggttggcgagactaccctccacccgcgccaaattggcctccgcatgcgccttggcgatggcctggttagcctccctcctctcctccaccagctggcgccggaggtccgtcctctcgccctccagggcggccaccttctccgccagcttgcggcacttgctgtccgcggtcgacttttcccggacggcgtcagcatgctgcgcccgaagtctctcgacttcggcagacacatctgcagtaagggcccccgacgacacgcggtcggcgaagtcggccgcctaacagacacacatgagaccacaatccccatggaagcggtaaacaccgaagtccagctcaacttacttgactcagccgctgcgacgcctccctcagccggcgggacacagtgcccgcttcgtccttgacggcagtgaccgccgaaatctcaccgccagcgctgagagcgctacccttcaccccaggcaccgcggcagacaccgtggtcgccaccacaggcgaaacaacagcaagttgcccctcgcccgatcctgcagcgtatcaccagtttaaaaaaaaccttaccaacgagatagtcatccacgctaatatttgtgctgaagtcggccacgcgtttccccggcgaaggcaattcccggaccttcgcagctccgtccgggacagacttggttccgccggcgccggccgccttcacgctctccggcaccttgccggacccaggggcggccgacttcgccgccagcgtaggctggctaccgccggggacggtagccttcgcggtcccccgcgccctcttcggcctagcttcggggagcctgatgaccgcccggcgcttctgcgcaacttcctgacgatccttgttcatcactgccgacacaacagcagcaatattccgtccgtaaggaaacactacaacagaacaaccctgtaactacgcatgtctaacaacgcatggttttatatgttgcaaggaagcatataacaacacttattatgtgttgcaagtgttatgtgttgcttaggagcacaaagcaacgcatattatgtgttgcaagtgttatgtgttgctaacgagcatagagcaacacttattatgtgttgcaaatatcatcggtgtagttattgtatgttgcaattaaaccattaagtgattagatttgtagccaccataggcatgatttatatatgttgcaaggtaatccatacagtattgtaagtataactactttagaaaattactattgtaattatacatactgtacaaatttacgcaactgttttatgtagaccgtaaaaatttatagaaaactgatattgcaaaaaaacaaaatagtataccctagtatttgatcctgcaacctaacctatgggcataccataatctgtgctttagtaaccaaatgagctattgacgagttgtgataggaaagtgtttataatttacttattctatcttctgaacgcggtggatccaggtcccacaccggaggtacgctagggttccacctgagatcttccttcttcccgctctgctcgtctccccattggattcctcgccgcttgtggtttcttccccattgtcatagagtcaggcaaaggtcctgtgcgccgtcgcagatcttagggaggtcagtgcgccgtcgctattccctttgtctctgtgcgccctcgctcatcttctcttcgtctctgtgtgccatagctcctcttcccttcatcgaattccctggtggcgtggatattctggatagttccctgcatagttcctagcagcacaacggcataagtcagagggggagaagccaatcatcatccggtacgtttcttgatttcctcttcttgttgcctccgatcgacgaacactagggatgcgcttcgaaccagtagccgggtctcagtttcttagggagtgcatgaaaggttgaactagtaccattatttatcgactttctaacaatcagaagagtaaggtatggaaaattttctgaacatatctaaaacatgatatttgtttatgtatagactagctgggtaaatataattttgagctattattgtgttacttgtagacatctagaaatcaatatactaatacaattgagaaataagttttagattttttatagtagaattaacatcattattttttatagtttcataatggatttagaggtggtgaagcttcttttgcaatgttctaaaggctcggctcaatatgtagccggtgtaaaaggcttcttagaatttgcattcaaagataaacctgaaggaagcaagaattattgcccttgtaagtcatgcgtgcacactactgtgcagccaagcgc

SEQ ID NO: 373 - DNA, 13966 bp, Zea mays
  source (0)...(0): Zea mays BAC clone full insert sequence contig bacm.pk147.d02.fis50
  misc_feature (1)...(13966): n = A,T,C or G
ctggcacaagaacttctgataatttatgtcatgtgtagtgggagatgccagggggaaggaggaagcagacgttgaaagcaatgaggagtatctatcagaggaccatgtagggcaaaaaaaattacagaaaactcttgcacatgaatcagatagcgagatggaagaagaatcgtttgccgtaggtggacatgatcaaagtggtgaggtttctgaaatggagcctaattcaaagaacccaactgatatggatgcagacattgaggttgaagacgaaggtactgaaataagataacgtactttttaagaatagtcgtaatcatccatttgtaaccatttgttccattatttttgcattttgaccccggatagagacaaatgtggaggtgaaaaggcggggtaagacaaaactattacaggtgtggaacattcctagagggcataggattgtagtacaatgtaatgaacttgaccagccaattggagaagaggcaggaatcatgggaaaattccttggcatggtagccaggaatggaaacttgtgtagcttaagctacaaggattggaggctttttgatgcggacatcaacaccaacacgagcacatctacaccagcagcaccttctccagcccaggcgccaccccttccacctgggccagtgactcgggcccgtgcaagagaattgaactacatcatgttgttaaagaacgaaggcccggaagaatagacgaccagcccaattgcggcccataatggacgacctagggttggccgcccctaggggctgcgccccctctctatttattcaggagctgcgcctcctttatttcctgagttttgttttacgttagccttagctactctcgaacacgcgcaaatctgcgctgtcttcgtgtattcagaactccaccctcgagtaatagattagattgctcgcatcttgttcttgttcgttcttcgattgcgcacaggaaacgatcttcgtgatcaggccgatctcgcatcagcaaggtcggtaaccacagggagttggttcagcgattgcattggcgcctcgggcttgctcgtcgtagtcggatcgcaagggtcatcttccgacaaatcggaattatctctactcgccgaaagatcgggcacctcagcttcatcacttttgataggtaagaaagagagattgactaatgagcagaaaaataaggaggatatacttaagcaagtaaaggtatgacacatttattgcagtaattatctagaagatgatacatagggtaattttaccattgtctttatatattgtatgcagaggagattcctttatcctgctcgtatggaaaaatgggtactaaaaaccattggagagagatggaggcaacataaatctaacttaaaatccatatattatgatgcacataagggtttggaagctaattacaacaacgttccacctggggtaattgcggatcagtggattgcacttgtgaatcattgggtgaccacaaaagcaaaggtggctacctttacattaatcagttatcttgtgcaacttgtcagttgtgattacattatctatgtaatcattttatggtaggatataagcatggcgaatacgaataactgtggaaaaaaaagactacccatacagccggcacaaagagtttcgctcggactagagaggatttggtacttctgttgcaactacacttgtgaagaacatgctttttacaaccatatttctgtcactaatctttattaccttacatgtccaacagagggaaaaaggtcctgagaagaaataccctcacagggctattttatatatccacacacacaaagcaaaccctaccaagaacacaaatccacatgtggtacaattttctacaaatatttactggttcaaaatttttatgtacttgtgacatgctgaataagttaatccttttaaaagaatgatttgcaggaactgttagcagagcatccagaatttgcagacactagccaaggaaagattgcatggaatgaagatgcactaaacaagatattaggagaagagaagcctggtcatgtgcatggccttggtcttgttccaaacctgaacaaagtgttagatgggacaacatcaagacgtcttaatcagatacatgtaacatctttggacccaacagcaagtgaagatgtcctctctttganacttcagatgngaaaactcgtaaaccatgtacacaagcnagatgctactatacaagagtttgcacaangaatatatgatgtagctgaggtgcccgatctttcggcgagtagagatatttccgatttgcgggaagttgacccttgcgatccgactacgacgagcaagcccgaggcgccaatgcaatcgctgaaccaactccctgtggttaccgaccttgctgatgcgagatcggcctgatcacgaagatcgtttcctgtgcgcaatcgaagaacgaacaagaaaaagatgcgagcaatctaatctattactcgagggtggagttctgaatacacgaagacagcgcagatttgcgcgtgttcgagagtagctaaagctaatgtaaaacaaaactcgaagaacaaaggaggcgcagctcccgtttaaatagagagggggcgcagcccctaggggtggccaaccctaggtcgtccactatgggccgcagttgggctggtcgtctattcttctgggccctcattccttagtacaatgacgaagttaagatctctggcacgggcccgagtgattggcccagctaatgaaggaagtggcgcttgatgttgaggtgctgctggtgtagtcgtactcatagtgatgtcctcatcatcctccccttcttgaagtgaagtcgtcctcgacggcaactcctcatcctcggccatatatggtttcaaatctgcaacattaaaactagtggaaacaccaaattccgcaggcaggtcaaggatataagcattatcattaatctttgttagcaccttaaaaggaccagcagcacgaggcattaatttagaacggcgcaaagtaggaaaccgatcctttctcaagtgcaaccaaaccatatcacctggctcaaaagtaacaagttttcttcctttactaccagcaacctgattttttgcattagtagcagcaatgttctgtttcgtttgttcatgtatggtaatcatttgttcaacatgtgcagcagcatctacatgtggcgcgttcgtagcattaagtgaaatcaaatcaataggtgccctagggatgtaaccataaacaatctcgaaagggcacatctttgtagaagaatgtgtggcatgattgtaagcaaattcaacatgaggcaaacaatcctcccaacgtctcaaattcttgtctaaaacagccctaagcatggtagataaagttctatttactacctcagtttgtccatcagtctgagggtgacaagtagtgctaaacaacaatttagttcccaatttattccaaagagatctccaaaaatggcttagaaacttagcatcgcgatcagagactattgtttttggaataccatgtaaacgaataatttctctaaagaacaattcagcaacaatgctagcatcatcagttttatgacaaggtataaagtgagccattttagagaatctatcaacaaccacgaaaatactatccctccccttcttagttctaggcaagcccaaaacaaagtccatagaaatatcaagccaaggagaagaagggacaggcaaaggcatatacaaaccatggttgttcaaccgtgacttagctttctgacaagtagtgcagcgtttaacaaggcgctcaacatcagcgcgcatccgaggccaaaagaagtgggcagccaacacctcatgcgtcttgtagacgccaaaatgccccatgagaccgcctccatgcgcttcctgtaacaacaaaagacgaaccgagctagctggaacacacagcttgttagcgcgaaacaggaacccatcctgtatgtgaaatttgccccatggtttcccattaatacaatggccgaaagcatctttaaaatcagcatcgtcaacatattgatccttcacagtgtccaaaccaaagattttaaaatctaactgtgacagcatggtatagcgacgagacaaagcatcagcaataacattgtccttcccgttcttgtgtttaataatgtaaggaaaggactcaatgaattctacccatttagcatgacgacggttcagatttgtttgggtacgaatatgttttaaagcctcatgatcagaatggattataaactcacgatgccaaagatagtgctgccatgtatgcaaagtgcgcactaaagcgtaaagctccttatcataagtagaatatttcagactagcaccgcttaatttttcactaaaataagcaactggttttccttcttgtaacaaaacagcacctagcccaataccgctagcatcgcattcaagctcaaacactttattaaaatcaggcaattgcaataggggagcttgggttaacttatctttcaaagtgctgaacgctacctcctgcgaatcactccaagcaaacggcacatctttctttgtaagctcatgtagaggcgctacaatggagctaaaatcacgaacaaatctgcggtagaaaccggcaagtccaagaaagctccgaatttgtgtgaccgtcgtcggtgtaggccactcccgaatggcaggaatcttgctgctatccacctcaatgccctgcggagtaaccacataaccaagaaacgagacacgttgcgtgcaaaatgtgcatttttccatgttaccaaacaagcgagcagcacgcaaagcgtcaaaaacagcacgcaaatgttctaaatgctcctctatagacttgctgtaaataaggatatcatcgaaataaacaacaacaaacaaacctatgaaggcccgtagaacttcgttcattaaacgcataaaggtgctgggagcattagtcaatccaaatggcataaccaaccattcatataaaccaaatttcgttttaaaagccgttttccattcatcaccgagtttcattctaatctgatggtaaccgctacgcaaatcaaccttagagaaaataacggcaccactaagctcatctagcatatcatcaaggcgtggaataggatatcgataacgaactgtgatgttattaatagcacgacaatctacgcacatacgccatgacccatctttctttggaacgagtaaaacaggaaccgagcaagggctaagagactcacgaatgtaatccttatcaagcagcgtctgcacctggcgctggatctccttcgtctcatctggatttgtacggtacggggcgcggttcggaagagaagcgccggggatgagatcgatctgatgctcaatgccacggaggggtggaagacccggtggtaagtccgtaggataaacatcagcatactcctgcaaaaggttaacaacagcagggggtatatccaaagacggtgcatcatcaagcggaacaagcattcgcgagcatacaagtgcataacagggcatatgagcttcatggagatcatcaaaatcagcacgtgtagcaagtaaaacaggagagtgcaacttgatttcagatttaataggtgcggctgatgtcgatttgacttgttgtgcagttttagcagccctagtaagatcatctttcaaaatttggtcaggggtcattggatgtataattattttctggcctttaaacatgaaagaataatgatttgaacgaccatgatgtaaactatcagtatcatattgccaaggtcgacctaataacaaagagcatgcttccataggaataacatcgcaatcagcataatcagaataagaacccagcgaaaaggggacacgtaccgaacgtgttacctttattttaccaccatcattaagccattgaatgtgatacggatgtggatgtgtgcgagtgggcaaggataatttctctaccaacgctgtacttgccaaattgttgcagctgccactatcgatgatgatgcgaatcgaccgttcgtgcatgacgcccttggtatggaatagagtgtgtcgctgatttttttcggcctgggcaacctgtgtgctgagaacacgctgcacaacaagactctcatacctatcggcgtcgatgggatcaacgtggacttcctcattttctgcatggttagtggcaatcatagcatgactagtttcctcagaatcactggctgaagagtactcaccattgtcacgtataagcaaggtacgcttgtttgggcagtcccgaatcatgtgcccaaaccctctgcaacgatggcactgaatatcccgtgtacgtcctgtggaagaagcggcgcctttggcagggggtgccactggcttggccggccctgtgcgcgatgtagtgctaggcgtaggaggtgcagggctggaaggagttgagctgtgtgttggaccccggcctgcaaaagagttagtatatgtctttgatcgtcgtccctgcacttcacgttcagctttgcaagcatattcaaacaatgtggttatatcaaaataatccttataatcaagtatatcctgaatttccctgttcaaaccaccacgaaaacgcgccatagcagcgtcatctgactcaaccaaaccacaacgaagcatacccttttgcaactcctggtaatattcctcaacagattgtgaaccttgttgaaaacgctgcattttgttaagcaaatcacgagcataataggaaggaacaaatctgtggcgcatggcagtttttaattgggtccaagtaatgacactgttaatgggaagtttttgtttatactcacgccaccaaattaaagcaaaatcagtaaattcactaatggcagccttcacttggctattagcaggaatatcatggcatgaaaatttctgttctacctccaattcccaatcaagatatgcagcaggatcatatttaccattaaaagatggaattttaaatttaatcttagaaaataagtcattagggggatgacgaaccacaagacgtgcacgaccacggcgatctccatcgtcctgctcagtgtcaccgccgtattcctgctccatctttgtggtcaatgcatcaaggcgtgccaggatggtgtcgagtgtggtgcgagtcgccgtttgagcaaggtcaagttggttgaaacgctcggtcgtcgaagtgatcgttgaatcaagccgttcatgcatcgtcctaatgtccgcagcaagtccatcaacttgtccccttacttcctgcaactgggcatccaccatgtcgtgtgctcctgccatagttagcgcaacaccaaaacaccaaaaggagaaaaacaaacgacaaaaacaggggtgtactgctcacaaggcgctcacactagtgctgttatcaagttcttatccgttcttaccaagccacagtggtgaactgcaaccaacaggtggaaccggtgaaagattggatgagcgattgcctggagaaacagaaaccttctcgtcgtagaaatatgtggagttttgggtaggctgcactcaagtcaatgattagcacgatcaaacaataatgcaaagttgaattatagtgcaaaacacgaaactatattgctggtcacaagtgcaaaggacggatggaactagcagaatggcagtaccgtaaatattgtactagcgaggccactagtaggaatcacaagtgattttgtttttcttttttgtatgatttttttttgatatttttctcagcacaagaagcaacaaaataggagctacacgaagtttcacctaaaacagaaatcagatgtggtctatagaaaatctcgaagttctctgaaaagcgtgcgagaactttgacgaatttttttctttattttcctgaatttttttgacaattttgtcgaaccccaaacagaccgtaggtgagtttggccggactcagaatggtgtcgacaagctcctgtaaaaatttcagattttttggacacccgagcgaaaagttatgcctgttttacggaaggtacctcaagttatgttttaaaaacgaccgggatgaaacaaccgtatcctttctccttcgttttcttttttttgtttctgttttttttgagtaaccgaaggagaaaaacaaggaagcggttgttgactcggtttgtttttttcgtaaccgaaggagaaaaacaaggaaacggccgttgactcggtttgttttttttttgtttttttttgacgtaaccgaaggagaaaaacaaggagacgatgttgactcggtttgtggcgtgatcaaacgggagatggtggcggcgctagggtttgaatggtggaagaacacaatgcaaccagcaacaaggaaacgcggaagcacacaaattcaacaatgcagattattgaaagaaagtgcgaggctcaaaagggtgctgggataagatctaacctgaatttttatgtggttttgtggactgtaggaaaaaaacgctcgataaactcaccgatcaacctgaaaatctgataccaattgatgtagctgaggtgcccgatctttcggcgagtagagataattccgatttggcggaagatgacccttgcgatccgactacgacgagcaagcccgaggcgccaatgcaatcgctgaaccaactccctgtggttaccgaccttgctgatgcgagatcggcctgatcacgaagatcgtttcctgtgcgcaatcgaagaacgaacaagaaaaagatgcgagcaatctaatctattactcgagggtggagttctgaatacacgaagacagcgcagatttgcacgtgttcgagagtagctaaggctaacgtaaaacaaaactcgaaaataaaggaggcgcagctcctggataaatagagggggcgcagcccctaggggcggccaaccctaggtcgtccactatgggccgcagttgggctggtcgtctattcttctgggccctcattcttcagtaccatgacgaagttaagatctctggcacgggcccgagtgattggcccagctaatgaaggaagtggcgcttgatgtggaggtgctgctggtgtagtcgtactcatagtgatgtcctcatcagagggtacctgacccctcggctgggggagttgaggcgaccccggggagccaggccgaggcgtctgttccccgagagccgtcgcccacgccggcagcgcaggagagcgaccctcaggtcgccgtggcagtgcctgggcagtccgccccccgggcgtccaaagcgcccaaagcaagggcggtgccgaagctgccggcgaagcggacctcgacggcgcctttgggggtcgagatccgagagacctcccctcaggcacggttgatcatggcccggagcgggtaagtatcttggaacgtcttcatcctggcttttcattcgtatgtcccgaccgtgatttttctttccccctcagcaagcgaagccatggcctgaccgatctggctcccagaaaggcccttaagatggcgtcggcttgcgcagccggggccgctctgggccttgccgtccagctgaccttctcgcaaggcgccccacagcagggggctcaggcggcaccagtcgccgtggagcgagttcccgaggccggctcttctaccgaggcggccatcgtgctaggggaggcggctgacgcggacgtggcctcggccccaccggacgtgccggtggtgctggcacctgttgctactgaagccgccaccgtcccagtcggggagcgaccggtcgctgccgacgctgagacggccgaggcgtcggcgcttggtgcctcggaggaggggggcgtggagacgcgatccgtcccgccgggcggcagccttgtcgctgtgcggcggggctccgagggtcggcgccagttgctccagttccggacacgtgaggcctcggatcccgtcttcgtcctcgacgatgaacgggaggaacagtcctgggacgagctccacgagtgtgccgaagcaacggtggggtcgctccggtcgtcgctggaggttttctgcagggacgttcccaaaatcctccaggtaacggtttcgggcataccttttctcctttgtgaccaaggcgttttttcgtgacgtcccgcttccttcccctaggatctgacggatctgagcgccgccaagtcgtcgttcatccgccgcgaggtcgacgtctggggctcgctgcgatccctgaggacctcactcgccggggctactgcgcgcctctctcagcagggcgccgaggcggcggatcttcggttgctctgcaccgatctgagagccgaggcggcagcggcacgcgcagaagtgcaacgactgcagtcggagttcgaccggatcgtcaacgagcgggaccaatctcggggccgggctggagcccttgcagccgacctagccgtagcccaggtcgcagcctcggagcagcgtgcccgagtcggaggtacgccttggccatcttcggttttcgtttctgcttgtttcctccgcttgtgtttgagatctttcttctggctgttcgcagagctcgagtccgcccttgatgagtccgccaaggcgcttgccgaggcgcttgccggggcggccgagcagagggaggccgaccacgcggccatgtccgaggccgtctcggacttctgtcgggtccttggctccggcgacgtcccctcaggaagctcccctcaaagtcgcctgcaggtcttgggcgatcatgtgcgcagtagactccgcgaggcgctacaccacggtgtcaggcgggccttcgccgtgctcgcttcccactacgttgtggacctggagcgggtcagcgaggggtattgccttcctgacgaagatgaagccgccctggcagaagtccagaggctcgatgcggccgccgcgggtccaagcgcagtgctggcgaccaccttcgaggcagagatcctcccacctgcgccgtcgtccgaagccgggatggactttgccaagggcggggacgaagccgaaggcgcgggtccttcccagggcgacgcctaactctgtcggagcagtttctgttggatgcacgtgtgtctttctgcggccgctgaggcctgaacactttattaccgttgcatgaagtcgtgctcttctccctttcattttgcgcgtccggccccgcctgtcagtagcagggtggcttccccaagtaggggttacttttcgtggcgggtgacgagtgaggtgtccgtaacccagaggtgtaggacgatgaagacatccacactactgatacatctatgccaatacaagtaccaatttctggtcccattactcgcgctcgtgctcgtcaactcaaccatcaggtgattacactcttgagttcatgtccatcttatttagaccatggagacccgtgcactcttgttttgcttaggaaccagggagaagaccgaaagggaaaaggatttgaacatgctggattcggactgcagaagaacaccaacttgtgacggtcaccacggtcagatgcgggctcggattggaatgttcaagcacaacatggaaagcttatcaagtctactttcatatggatccggaattatagtcatatctgttctgaggccgccgtaatcattgttttcttaccgagatattttctgccttttctgcccatggtgctgcgtcaccctattttggcccaatgggtcgtgtatcaagttaggtccattagggacgcatcctagggttgcagcacgaccccaatacccttgtggtcgtcctcccatgtttatagaccccctagccgccaccaagaacagcgggttttgtttagatcaagtttagctctcgctacttgcttgcaagcgcgcgtgctagttcagccgcccgtcttcttgtcttcggaaccccaccatattggagtttgactttgaaacctacatttagatctggtaattcagtacttgttctacttgttcttgctagttcttcgattgcttgcaggacgagtgccctagtgggccagggtgtcacgctccacaagatcgtgacagccataggaggtggtgtatcggttgctaaggcgcagcgtctttggaaggctgtagtcgggccgtgaacgtcgtctcctcccccaatcgagttattccacaccctctcatcgaaagatcaggcaatcacccaacgggtgcacatcagttggtatcagaggaaggtttatcggtgagagatttacttttcttcgttgttttcttatctcctgtagtccagaaaaagccaaaaaaatagtagattagttttaccgcaatcctataaaccattgagcatttactaatactacttagttagggcttgttgagtttttggttgcatcggttgtgtcgagttgctggtcttagtttattcctttagagttttgagttctaccatgttttggtcaccacgagatccaccattaccataaacatctctggttcgtttttgccaccacggatacatctcatgtccgatttggaagtttaaatacaatctggaaagcttatctcatcttctttccaacggatctgaccttatctcaaaattcattctgagcgctccgcaatcatcgtagagatttctggactttctatattaacaagatttgttaaatctgatttaaaggggctgttagcaatatctttattgtttgggttgtcatagtgaaaaaagggtttaggcccctgcaaaaaaaaagaagaagaaaaagaatagaaaagaaaaaaaaagaggaaaagaagaagggggctgaatctctaaatctgttgtttctctctgtgctgtgctagttgttctttttcagtgactacctttgtgccaaggctcacgtctctagcatggtttagcctaggaccagcacagtaccaccgttgaacgattattcagcttgcttttgtaactaacgttgtactagtgtattccttgcttcagcccacctacaactctacatatttcgactacagtttgacaggtcgtgttgctgcggcaccgatacacttattccacggttgcagacttgttggttgctgacccctcctattgtgcaaggtaagaattggtaagagcttgtgtggcaggttgagagtgagcgccttgcagtagctacatcctaatagttgtagagtttttattccttcacgtttttttttcttgttgcctctgttcgtctaaccatggcaagattggaggttgatgatgcttctcgtaatatgccacactctcctcgcaccaagggtatcatacaacactttgtaaggctggtgaagacgcacacggaaggccttgataatgacatgcaggtgacgaatgaaaagatggggcaattggaggccacacagatcgacacaaacaccaaacttgcaaatgtggaaatgacagttgctcatattgacaagagccttgtcgcactcttgaggcgatttgatgagatgcatgctaataccaatggtgggcgtgatgagggcgccaaaggtaactgggatgactatgttgctgatactgaacaagatgaccaagaagcacctaatcgtcggcgactacgtactaaccgtagaggtatgggtggttttcgccaacgtgaggtacatggtaatgatgatgcttttagtaaggttaaatttaaaatacctccttttgatggtaaatatgaccctgatgcttacattacttgggagattgcggttgatcaaaagtttgcatgccatgaatttcctgagaatgcgcgggttagagctgctactagtgagtttactgattttgcttctgtttggtggatagaacatggtaagaagaatcctaataacatgccacaaacttgggatgcgttgaaacgggtcatgcgggctagatttgttccttcttattatgcacgtgatatgttaaacaagttgcaacaattgagacatggtactaaaactgtagaagaatattatcaggaattacaaatgggtatgctgcgttgta

SEQ ID NO: 374 - DNA, 758 bp, Zea mays
  source (0)...(0): Zea mays BAC clone full insert sequence contig Ch4 bacm.pk184.c21.fis1
  misc_feature (1)...(758): n = A,T,C or G
ggaaacgcgcattannnnnnnnnnnnnnnnnnnnnnnnnnnnnnnnnnnnnnnnnnnnnnnnnnnnnnnnnnnnnnnnnnnnnnnnnnnnnnnnnnnnnntttcgcgtgatttcattgtcgcacgtcacccattccgaaaacgggtgtcggggtgcatacaagcacgagtttttgccaccggaaccatttcttcgtttttcgcaacgaacataaccaatccactactttaggtccaaaactcatgtttgcggtggtttcgcgcaatttcattgccacaggtcagccaggccgaaaacgggagtcgggttgcaaccgaaaaatttcttcttttttcgcaacgaatataaccaatccactactttaggtccaaaactcatgtttgcggtggtttcgcgcaatttcgttgccgcacgtcacccattccgaaaacgggtgtcggggtgcatacaaccaagagttgtggccacgggaaccatttcttcgtttttcgcaacgagcatgccctatctactactttaggtccaaaactcatgtttggggtggtttcgcgcaatatcctttgccgcacgtcactcattccgaaaaacgggtgtcggcgtgcatacaaaagcacaaagtttttgccgcgggaacaaattttctcgttttttggccacaaagatcactcaccccattttttggcgcaaaacccccatgtctggagggtggtctgcccaaaattttttttgggggtgtttacctctttttaaaaaaaggg

SEQ ID NO: 375 - DNA, 777 bp, Zea mays
  source (0)...(0): Zea mays BAC clone full insert sequence contig Ch4 bacm.pk184.c21.fis2
  misc_feature (1)...(777): n = A,T,C or G
ngacnnnnnnnnnnnnnnnnnnnnnnnnnnnnnnnnnnnnnnnnnnnnnnnnnnnnnnnnnnnnnnnnnnnnnnnnnnngcaaaatgtgcacttctcaaggttaccaaataaacgtgcatctcgtaaagcattaaaaacagcacgcatgtgatcaacatgttcatccatagatttgctgtagattaatatgtcatcaaagtatactaccacaaattttccaatgaaggcacgcaaaacctcgttcattaatctcatgaaagtgctaggtgcattagttaacccaaaaggcatgactaaccactcatacaatccgaacttagttttgaaagcagttttccattcatctcccaatttcatacgaatctggtggtacccactacgcaaatcaactttagaaaagacaatggcaccactcaattcatcaagcatatcatctaaacgtggaatagggtgtcgataacgtatcgtgatattattaatagccctacaattaacacacatacgccatgttccatcttttttaggcactaaaataaccggaacagcacacggactaagagactcacgcacgtaacctttgtcgagtagttcttgcacttgtcgctgaatttcttttgtttcctctggatttgtcctatatggcgcacgattcggcaaagatgcaccaggaataagatcaatttggtgctcaatccctcgtataggtggcagcccctctggtatctcacttggaaatacatcagaatactccctgcaaatgttagtaataacaggag

SEQ ID NO: 376 - DNA, 770 bp, Zea mays
  source (0)...(0): Zea mays BAC clone full insert sequence contig Ch4 bacm.pk184.c21.fis3
  misc_feature (1)...(770): n = A,T,C or G
cgacnnnnnnnnnnnnnnnnnnnnnnnnnnnnnnnnnnnnnnnnnnnnnnnnnnnnnnnnnnnnnnnnnnnnnnnnnnnnnggagcttgttgacaccattctgaggccggccaaactcaccttcagtctatttggtttcgacaaaattgtcaaaacaattcaggaaaataaagaaaaaatccatcaaagttttcgcacgcttttcagagaacttcctgattttctgtagaccacatctgaactctgttttaggtgaaactttgtatagctcctattttgttgcttcttgtgctgagaaaaatatcaaaaaaatcatacaaaaaagaaaaacaaaatcacttgtgattcctactagtggcctcactagtataatatttacggtactgccattctgctagttccattcgtcctttgcacttgtggccagcaatatagtttcgtgttctgcactataattcaactttgcattattgtttgattgtgctaatcattgacttgagtgcagcctacccaaaactccacatatttctacgacgagaaggtttctgtttctccaggcaatcgctcatccaatctttcaccggttccacctgttggttgcagttcaccactgtggcttggtaagaacggataagaactttgatacagcactagtgtgagcgccttgtgagcagtacacccctgttttttgtcgctgggttttttttctccttttggtgtttttgtgggttgcgctaactatgggcagagcacacgacatggtggatgcc

SEQ ID NO: 377 - DNA, 569 bp, Zea mays
  source (0)...(0): Zea mays BAC clone full insert sequence contig Ch4 bacm.pk184.c21.fis4
  misc_feature (1)...(569): n = A,T,C or G
atccnnnnnnnnnnnnnnnnnnnnnnnnnnnnnnnnnnnnnnnnnnnnnnnnnnnnnnnnnnnnnnnnnnnnnnnnnnnnnnnnnnnnnnnnnnnnnnnnnnnntcctgtctgcagggcctgatactcagcaatgccctcagagcacagaaagatgctgaggacgaaggatgtactatagccctgagcaaccttcgttccgaagtaattgaactgaggaacgaaggtctcgaaaaagacaaaatattgcattccttaataaataaaataaaagaagacgaagctattttcaaaggtcaggccgaagctcagaagtgtgaaattgaaaaccttcgtaaacaattagccagagctaaagaggaatgcatacttgaagaaaacaggcgagaactcagcgaccaatgggcaaatcatttagaagaaaactgttaagagcttcggtcagcccaagaagaaatgcttcgacaaatcttatagagtgtgtcaaggaaaataaaaacttagcttcgcccagcgtttgggggccatttttccgcaaggaaggaaaaacttttattaaggaagggtaac

SEQ ID NO: 378 - DNA, 782 bp, Zea mays
  source (0)...(0): Zea mays BAC clone full insert sequence contig Ch4 bacm.pk184.c21.fis5
  misc_feature (1)...(782): n = A,T,C or G
ngacgcgtatagactnnnnnnnnnnnnnnnnnnnnnnnnnnnnnnnnnnnnnnnnnnnnnnnnnnntttacttgatttaggtccaaaacgcatgtttggggtggtttcgcacaatttcgttgcagcacgtcacccattctgtaaacaggtgtcgggtgcatacaagcaccagtttttgccaccggaaccatttcttcgtttttcgcaacgaacatgccgaatccactattttaggtccaaaacacatgtttgggttggtttcgcgcaattttattgccgcacgtaaccaattccgaaaacgggtgtcgggttgcatacaagcacgagtttttgccaccggaaccatttcttcgtttttcgcaacgaacatgcccaatccactactttaggtccaaaacacatgtttggggtagtttcgcgcgatttcattcccgcacgtcacccattccgaaaacgggtgtcggggtgcatacaaacacgagtttttgccaccggaaccatttcttcgtttttcgcaacgaacatgcccaatccactactttaggtccaaaactcatgtttgcggtgggttcgcgcaatttcattgccgtacgtgacccattccgaaaacgggtgtcgggggcatacaaacaccaagtttttgtgcccgaaacctatcttcttttttctccaacaaaaaatcccaaacccttacttttggagcaaaaaaccaatctttgtggggagttgttccaaaaaattattttgcggcgggtttaacgcaatttttaaaaggggggggg

SEQ ID NO: 379 - DNA, 904 bp, Zea mays
  source (0)...(0): Zea mays BAC clone full insert sequence contig Ch4 bacm.pk184.c21.fis6
  misc_feature (1)...(904): n = A,T,C or G
cgcaacgcgcattnnnnnnnnnnnnnnnnnnnnnnnnnnnnnnnnnnnnnnnnnnnnnnnnnnnnnnnnnnnnnnnnnnnnnnnnnnnnnnnnnnnnnnnnngcttcggcgagtcagcttcaagcttcctggcaacagcctccgcctccacctccgttgcaacagggccagcagccagaagggagccaatatgctccacatcaaagggacttcagagaacagtccgaagctcgcacggtcaacagcaccgtgccagaatcaaagcacatctattgacaaatatcctaccttaatagcaatctttttcattcagttttattttctgtaataaagaacattgtttaggtttcatgtaattagtttcgttgattcctacaagaaaaatatgttttcttcacaggtttgtgataataaaaaggaccttcggactatcgaaaattcttcgaagcaataacaagtcgttctaaggaacgcagagtaagtctgacgaagtcacaaaaagtcgttccgaagggagcgcagtgtaagttttctgctccaaagtcgttcctaagggaatgcagagcttataccgcctaagtaaaaggcgaagaagctccaaagtcgttcctaagggaatgcagagcttataccgcctaagtaaaaggcgaagaagctccaaagacgttcctaagggaatgcagagcttataccgcctaagtaaaaggcgaagaagctccaaagacgttcctaagggaatgcagagcttacagcgaagaatcagcgctaatacaaaaatattgtgtggggatatgtgtgtatctttcggaacaaatgtcatctacataacataacatcatcacatcattttgcatagcatgagcatcatacatcatgttgcatatggcacaagaaagggacacaa

SEQ ID NO: 380 - DNA, 169 bp, Zea mays
  source (0)...(0): Zea mays BAC clone full insert sequence contig Ch4 bacm.pk184.c21.fis7
cgaaggaagaatatgtctgtgttaatagttttaaacaaacgaaaaatcttgaactcaacaaaaatataagaattctatttgtcgcacctttaaactgttgtaagctaggctgtcagccagatcgttctttgacagcaccgaaagtccgtcttctaaagttgggaatccg

SEQ ID NO: 381 - DNA, 851 bp, Zea mays
  source (0)...(0): Zea mays BAC clone full insert sequence contig Ch4 bacm.pk184.c21.fis8
gacgtgcgggaatgaaatcgcgcgaaactaccccaaacatgtgttttggacctaaagtagtggattgggcatgttcgttgcgaaaaacgaagaaatggttccggtggcaaaaactcgtgcttgtatgcaacacgacacctgttttcagaatgggtgacgtgctgcaacgaaattgtgcgaaaccaccccaaacatgcgttttggacctaaagtagtggattgggcatgttcgttgggaaaaaacgaaaatatggttcctgtggcaaaaactcgcgcttttgtatgcaccccgacaccctttttcagaatgagtgacgtgcggcaacaaaattgcgcgaaaccaccccaaacatgagttttggacctaaagtagtggattgggcatgttcgttgcgaaaaacgaagaaatggttccagtggcaaaaactcgtgcttgtatgcaccccgacacccgttttcggaatgggtgacgtgcggcaatgaaattgcgcgaaacccccgcaaaaatgagttttggacctaaaataatgaattggttatgttcgttgcgaaaaacgaagaaatggttccggtggcaaaaactcgtgcttgtatgcaccccgacacccgttttcggaatgggtgacgtgcgacaatgaaatcacgcgaaaccgctgcaataaaattgtgcgaaaccaccccaaacatgtgttttggacctaaagtagtggattcggcatgttcgttgcgaaaaacgaagaaatggttccggtggcaaaaactcgtgcttgtatgcacccgacacccgttttcggaatgggtcacgtacggtaatgaaattgcgcgaaaccaccgcaaacatgagttttgga

SEQ ID NO: 382 - DNA, 1471 bp, Zea mays
  source (0)...(0): Zea mays BAC clone full insert sequence contig Ch4 bacm.pk184.c21.fis9
gagacacaatcttcatcttcggagtatagcttgggagaatgttttcacgaagcttggatattcttcatctgagcactatggacattgttgtgatacatagaaattttcttcacgaagcatgaaaagaagggataggtgttttttcgccagactcaaaaaaggtatgtatgaaaagtttcatgcatcgtaaagaattgaaccataaagagaaataaaacaaatatgttacatacaggattacaagatattacatatgttacatttaaaatgtttttacaatagcatctagtcttccctaagtaccacttctgcagcttcgttcaacagtcgatcgacaacttcatccataatagcttcagccatctttttaatctcatcgtcacccttaggccgtgcacccggagatacttcagtaggatctgaggaaggacaggacacggctgctttgctgttacaagttgcaaacaaatcttaaagcctaagattacaacacgataaaaactattatttaatacctaattgaccttcggcctctgcgctcttttcagcagcctcagctacttctctagcatcatgaatgcccttttcacttcttcgaataatttctccggccatttctcggccaccattatcccagatatcggtaaaaaactttccaccaattatgctagcttcggccgaggggtctcttgtatcttcataggacaaggcagcttcggactgtgctaaaatttttacatgttcgcagcccttcttctctaagatggtggcaatccctctggcgccagagaaggcacatatatctcctcggctatttaaaatttcttcgaaggcttcagcttcatggtcaatccattcaatgacaccttcgggattgcctctcgaaaagttttcttcacttgagaatgcgccgaccttggcgaagctagcctttaattttttaacgcaatctatagatttattgtagcatctctttttggatgaacgaagctcttcaacagtcacttctaggtgatctgcccattgatcgctgagttcacgctttgtttcttcaagtatacgttcttctttggctctcgccagttgtttccgaaggtcttcaatttcgcgtttctgagcttcagcttgacttttaaaagcagcttcgtcctcctttattttatctattaatgagtataatattttgtctttttcgagaccttcgttcctcagttcaattacttcggaacgaaggttgctcagggctatagtacaaccttcgtcttcagcatctttctgtgccctgagggcattactgagcatcaggccctgcaaacaggagcatgtctgtgtcaatagttttaaacaaacgaaaaattttaaactcgacaaaaaaatacaagaattccatttgtcccacctttaaactgttgtaagctagactgtcagccagatcgttttttgacagcaccgaaagtccgtcttctaaagt

SEQ ID NO: 383 - DNA, 2328 bp, Zea mays
  source (0)...(0): Zea mays BAC clone full insert sequence contig Ch4 bacm.pk184.c21.fis10
aatcaaaataatcatataatcaagtatatcgtgaatttccctgttcaaaccaccacgaaaacgcgccacagcagcgtcatccgactcaaccaaaccacaacgaagcatacccttttgtaactcctggtaatattcctcaacagattgtgaaccttgttgaaaacgctgcattttgttaagcaaatcacgagcataataggaaggaacaaatctgtggcgcatgacagtttttaattgggtccaagtaatgacactgttaatgggaagtttttgtttatactcacgccaccaaattaaagcaaaatcagtaaattcactaatggcagccttcacttggctattagcaggaatatcatggcataaaaatttctgttctacctctaattcccaatcaagatatgcagcaggatcatatttaccattaaaagatggaattttaaatttaatcttagaaaataagtcattagggggatgacaaaccacacgacgtgcacgaccacggcgatctccatcgtcctgctcagtgtcaccgcctgctccatctttgtggtcaatgcatcaaggcgtgccaggatggtgtcgagtgtggtgcgagtcgccgtttgagcaaggtcaagttggttgaaacgctcggtcgtcgaagtgatcgttgaatcaagccgttcatgcatcgtcctaatgtcagcagcaagtccatcaacttgtccccttacttcctgcaactgggcatccaccatgtcgtgtgctcctgccatagttagcgtaaacaccaaaacaccaaaaggagaaaaaccgacgaaaacaggggaatggtggtgacaacttgctcgctcgatggaatgctgttatcaagttcttatacgttcttaccaagccacagtggtgaactgcaatcaacaagtggaaccggtgaaagattggatgagcgattgcgtggagaaacagaaacctgctcgtcgtagaaatatgtggagttctgggtaggctgcactctagtcaaggattagcacgatctaacaataatgcaaagttgaattatagtgcaaaacacgaaactatattgttggccacaggtgcaaaggacagatggaactagcagaatggcagtatcgtaaatactgtactagtgatgccaaaaaggcactagtaggaatcacaagtgattttgtttttcttttttgtatgatttttttgatattttctcagcacaagaagcaacaaaataggagctacacgaagtttcacctaaaacaaagttcagatgtggtctacagaaaatcaggaagttctctgaaaagcgtgcgagaactttgacgaatttttttctttattttcttgaaattttttgacaattttgtcgaaacccaaacagaccataggtcagtttggccggcctcagaatggtgtcaactagctcctgtaaaaatttcagattttttggacaaccgagcgaaaagttatgcccggtttaaggaaggtacctcaagttatgtttaaaccgaccgagatgagacaaccgctttgtttcctttccctatttttttgtttgttctctggttctatgctttctctttctttttcttttttttcttttcttttttttgtttctgttttttttacgtaaccgaaggagaaaaacaaggaagcggcgttgactcggtttgtggcgttgaatcggtttgatgtaaccgaaggagagaaacaaggaagatggttgcgacacgctagggtttgatgtaaccgaaggagaaaaacaaggtagaagaaggatggtgagaaaaaaacacaatgcgaccagcaacaaatgaaccgaaagcacacaaattcaacaatgcatattattgaaataaggtgcgagactcaaaagggtgctggtataaggtctaacctgaatttttatgtggttttgtggactgtaggagaaaaaaacactcgataaactcaccgatcaacctggaaatctgataccaattgatgtagctgaggtgcccgatctttcggcgagtagagataattccgatttggcggaagatgacccttgcgatccgactacgacgagcaagcccgaggcgccaatgcaatcgctgaaccaactccctgtggttaccgaccttgctgatgcgagatcggcctgatcacgaagatcgtttcctgtgcgcaatcgaagaacgaataagaaaaagatgcgagcaatcaaatttattactcgagggtggagttctgaatacacgaagacagcgcagatttgcgcgtgttcgagagtagctaaagctaacgtaaaacaagtacttgaaaacaaaggaggcgcagctcctggatacaggcccg

SEQ ID NO: 384 - DNA, 2017 bp, Zea mays
  source (0)...(0): Zea mays BAC clone full insert sequence contig Ch4 bacm.pk184.c21.fis11
caagtaatgtaagcatcagggtcatatttaccatcaaaaggaggtattttaaatttaaccttactaaaagcatcatcattaccatgtacctcacgtcggtgaaaaccacccatacctctacggttagtacgtagtcgccggcgattaggtgcttcttggtcatcttgttcagtatcagcaacatagtcatcccagttaccttcggcgccctcatcacgcccaccattgatattagcatgcatctcatcaaaccgcctcaagagtgcgacaaggctcttgtcaatatgagcaactgtcatttccacatttgcaagtttggtgttcgtgtcgatctgtgtggcctccaattgccccatcttttcattcgtcacctgcatgtcattatcaagaccttccgtgtgcgtcttcactagccttacaaagtgttgtatgatacccttggtgcgaggagagtgtggcatattacgagaagcatcatcaacctccaatcctgccatggttagacgaacagaggcaacaagaaaaaaaaaacgtgaaggaataaaaactctacaactattaggatgtagctactgcaaggcgctcactctcaacctgccacacaagctcttaccaattcttaccttgcacaacaggaggggtcagcaaccaacaagtctgcaaccgtggaataagtgtatcggtgccgcagcaacacgacctgtcaaactgtagtcgaaatatgtagagttgtaggtgggctgaagcaaggaatacactagtaccacgttagttacaaaagcaagctgaataatcgttcaacggtggtactgtgctggtcctaggctaaaccaggctagagacgtgagcctaggcacaaaggtagtcactgaaaaagaacaactagcacagcacaaagagaaacaacagatttagagattcagcccccttcttcttcttttccttttttttcttttctattcttttttttcttcttcttctgtttttttttgcaggggcctaaacccttttttttcactatgacaacccaaacaataaagatattgctaacaacccctttaaatcagatttaacaaatcttgttaatataggaagtccagaaatctctacgatgattgcggagcgctcagaacgaattttgagataaggtcagatccgttggaaagaagataagataagctttccagattgtatttaaacttccaaatcggatatgatatgtatccgtggtggcaaaaacgaaccagagatgtttttggtgatggtggatttcgtggtgaccaaaacgtggtagaactcaaaactctaaaggaataaactaagaccagcaactcgacacaaccgatgcaaccaaaaactcaacaagccctaactaagtagtactagtaaatgctcaatggtttataggattgcggtaaaactaatctactattttttggctttttctggactataggagataagaaaacagcgaagaaaagtaaatctctcaccgataaaccttgctctgataccaactgatgtgcacccgttgggtgattgcccgatctttcgatgagagggtgtggaataactcgattgggggaggagacgacgttcacggcccgactacagccttccaaagacgctgcgccttagcaaccgatacaccacctcctatggctgtcacgatcttgtggagcgtgacaccctggccactagggcactcgtcctgcaagcaatcgaagaactagcaagaacaagtagaacaagtactgaattaccagatctaaatgtaggtttaaagatcaaactacaatatggtggggttccgaagacaagaagacgggcggctgaactagcacgcgcgcttgcaagcaagtagcgagagctaaacttgatctaaacaaaacccgctgttcttggtggcggctagggggtttataaacatgggaggacgaccacaatggtattggggtcgtgctgcaaccctaggatgcgtccctaatggacctaacttgatacacgacccattggg

SEQ ID NO: 385 - DNA, 1767 bp, Zea mays
  source (0)...(0): Zea mays BAC clone full insert sequence contig Ch4 bacm.pk184.c21.fis12
cgaaaaaattgcagcacgaccccaatacccttgtggtcgtcctcccatgtttataaaccccctagccgccaccaagaacggcgggttttgtttagatcaagtttagctctcgctacttgcttgtaagcgcgcgtgctagtcagccgcccgtcttcttgtcttcggaaccccaccatattgtagtttgatctttaaacctacatttagatctggtaattcagtacttgttctacttgttcttgctagttcttcgattgcttgcaggacgagtgccctagtggccagggtgtcacgctccacaagatcgtgacagccataggaggtggtgtatcggttgctaaggcgcagcgtctttggaaggctgtagtcgggccgtgaacgtcgtctcctcccccaatcgagttattccacaccctctcatcgaaagatcgggcaatcacccaacgggtgcacatcagttggtaatcagagcaaggtttatcggtgagagatttacttttcttcgctgttttcttatctcctatagtccagaaaaagccaaaaaatagtagattagttttaccgcaatcctataaaccattgagcatttactagtactacttagttagggcttgttgagtttttggttgcatcggttgtgtcgagttgctggtcttagtttattcctttagagttttgagttctaccacgttttggtcaccacgaaatccaccatcaccaaaaacatctctggttcgtttttgccaccacggatacatatcatatccgatttggaagtttaaatacaatctggaaagcttatcttatcttctttccaacggatctgaccttatctcaaaattcgttctgagcgctccgcaatcatcgtagagatttctggacttcctatattaacaagatttgttaaatctgatttaaaggggttgttagcaatatctttattgtttgggttgtcatagtgaaaaaaaagggtttaggcccctgcaaaaaaaaacagaagaagaagaaaaaaaaagaatagaaaagaaaaaaaaggaaaagaagaagaagggggctgaatctctaaatctgttgtttctctttgtgctgtgctagttgttctttttcagtgactacctttgtgcctaggctcacgtctctagcctggtttagcctaggaccagcacagtaccaccgttgaacgattattcagcttgcttttgtaactaacgtggtactagtgtattccttgcttcagcccacctacaactctacatatttcgactacagtttgacaggtcgtgttgctgcggcaccgatacacttattccacggttgcagacttgttggttgctgacccctcctgttgtgcaaggtaagaattggtaagagcttgtgtggcaggttgagagtgagcgccttgcagtagctacatcctaatagttgtagagtttttattccttcacgttttttttttcttgttgcctctgttcgtctaaccatggcaggattggaggttgatgatgcttctcgtaatatgccacactctcctcgcaccaagggtatcatacaacactttgtaaggctagtgaagacgcacacggaaggtcttgataatgacatgcaggtgacgaatgaaaagatggggcaattggaggccacacagatcgacacaaacaccaaacttgcaaatgtggaaatgacagttgctcatattgacaagagccttgtcgcactcttgaggcggtttgatgagatgcatgctaatatcaatggtgggcgtgatga

SEQ ID NO: 386 - DNA, 3315 bp, Zea mays
  source (0)...(0): Zea mays BAC clone full insert sequence contig Ch4 bacm.pk184.c21.fis13
tcatttgttcaacatgtgcagcagcatctacatgtggggcgttcgcagcattatgtgaaatcaaatcaataggtgccctagggatgtaaccataaacaatctggaaagggcacatctttgtagaagaatgcgtggcatgattgtaagcaaattcaacatgaggcaagcaatcctcccaacgtctcaaattcttgtctaaaacagccctaagcatggtagataaagttctatttactacctcagtttgtccatcagtctgaggatgacaagtagtgctaaacaacaatttagttcccaatttattccaaagagatctccaaaaatggcttagaaacttagcatcgcgatcagagactattgtttttggaataccatgtaaacgaataatttctctaaagaacaattcagcaacaatgctagcatcatcagttttatgacaaggtataaagtgagccattttagagaatctatcaacaaccacaaaaatactatccctccccttcttagttctaggcaagcccaaaacaaagtccatagagatatcaagccaaggagaagaagggacaggcaaaggcatatacaaaccatggttgttcaaccgtgacttagctttctgacaagtagtgcagcgtgcaacaaggcgctccacatcagcgcgcatccgaggccaaaagaagtgggcagccaacacctcatgcgttttgtagacgccaaaatgccccatgagaccgcctccatgcgcttcctgtaacaacaaaagacgaaccgagctagctggaacacacagcttgttagcgcgaaacaggaacccatcctgtatgtgaaatttgccccatggtatcccattaatacaatggctaaaagcatctttaaaatcagcatcgtcaacatattgatccttcacagtgtccaaaccaaagattttaaaatctaattgtgacagcatggtatagcgacgagataaagcatcagcaataacattgtccttcccgttcttgtgtttaataatgtaaggaaaggactcaatgaattcgacccatttagcatgacgacggttcagatttgtttgggtacgaatatgttttaaagcctcatgatcagaatgaattatgaactcacgatgccaaagatagtgctgccaagtatgcaaagtgcgcactaaagcgtaaagctccttatcataagtagaatatttcagactagcaccgcttaatttttcactaaaataagcaactggttttccttcttgtaacaaaacagcacctagcccaataccgctagcatcgcattcaagctcaaaaactttattaaaatcaggcaattgcaagaggggagcttgggttaacttatctttcaaagtgctgaacgctacctcctgcgaatcactccaagcaaacgacacatctttctttgtaagctcatgtagaggcgctgcaatggagctaaaatcacgaacaaatctgcggtagaaaccggcaagtccaagaaagctccgaatttgtgtgaccgtcgtcggtgtaggccactcccgaatggcagcaatcttgctgctatccacctcaatgccttgcggagtaaccacataaccaagaaacgagacacgttgcgtgcaaaatgtgcacttttccatgttaccaaacaagcgagcaacacacaaagcatcaaaaacagcacgcaaatgttctaaatgctcctctatagacttgctgtaaataaggatatcatcgaaataaacaacaacaaacaaacctatgaaggcccgtaaaacttcgttcattaaacgcataaaggtgctgggagcattagtcaatccaaatggcataaccaaccattcatataaaccaaatttcgttttaaaagccgttttccattcatcaccgagtttcattctaatctgatggtaaccgctacgcaaatcaaccttagagaaaataacggcaccactaagctcatctaacatatcatcaaggtgtggaataggatatcgataacgaactgtgatgttattaatagcacgacaatctacgcacatatgccatgacccatctttctttggaacgagtaaaacaggaaccgagcaaaggctaagagactcacgaatgtaacctttatcaagcagtgtctgcacctggcgctggatctccttcgtctcatctggatttgtacggtacggggcgcggttcggaagagaagcgccggggatgagatcgatctgatgctcaatgccacggaggggaggaagacccggtggtaagtccgtaggataaacatcagcatactcctgcaaaaggttaacaacagcagggggtatatccaaagacggtgcatcatcaagcggaacaagcatgcgcgagcatacaagtgcataacagggcatatgagcttcatggagatcatcaaaatcagcacgtgtagcaagtaaaacaggagagtgcaacttgatttcagatttaataggtgcggctgatgtcgatttgacttgttgtgcagttttagcagccctagtaagatcatctttcaaaatttggtcaggggtcattggatgtataattattttctggcctttaaacatgaaagaataatgatttgaacgaccatgatgtaaactatcagtatcatattgccaaggtcgacccaataacaaagggcatgcttccataggaataacatcgcaatcagcataatcagaataagaacccagcaaaaaggggacacgtaccgaacgtgttacctttattttaccaccatcattaagccattgaatgtgatacagatgtgggtgtgtgcgagtgggcaaggataatttctctaccaacgctgtacttgccaaattgttgcagctgccactatcgatgatgatgcgaatcgaccgttcgtgcacaacgcccttggtatggaatagagtgtgtcgctgattttttcggcctgggcaacctgtgtgctgagaacacgctgcacaacaagactctcatacctatcggcgtcgatgggatcaacgtggacttcctcattttctgcatggttagtggcaatcatagcatgactagtttcctcagaatcactggctgaagagtactcaccattgtcacgtataagcaaggtacgcttgtttgggcagtcccgaatcatgtgcccaaaccctctgcaacgatggcactgaatatcccgtgtacgtcctgtggaagaagcggcgcctttggcagggggcgctactggcttggtcgtccctgtgcgcgatgtagtgctaggcgtagaaggtgcagggctggaaggagttgagctgtgtgttggaccccgaccagagaaaagagttag

SEQ ID NO: 387 - DNA, 4575 bp, Zea mays
  source (0)...(0): Zea mays BAC clone full insert sequence contig Ch4 bacm.pk184.c21.fis14
gaaaagcgtgcgagaactttgacgaatttttttctttattttcctgaatttttttgacaattttgtcgaaccccaaacagaccataggtgagtttggccagcctcagaatggtgtcaacaagctcctgtaaaaatttcagatttttttggacacccgagcgaaaagttatgcccggtttacggaaggttcctcaagttatgttttaaaaacgaccgggatgaaacaaccgtatcctttctccttcgttttcttttttttgtttctgtttttttatgtaaccgaaggagaaaaacaaggaagcggtcgttgactcagtttgtttttttctgtttttttttcgtaaccgaaggagaaaatcaaggaaacagccgttgactcgatttgttttttctgttttttttacgtaaccgaaggagaaaaacaaggaaacaatgttgactcggtttgtggcatgatcaaacgggagatggtggcggcgctagggtttgaatggtggaagaacacaatgcaaccaacaacaaatgacgcgaaagcacacaaattcaacaatgcagattattgaaagaaagtgcgaggctcaaaagggtgctgggataagatctaacctgaatttttatgtggatttgtggactgtaggaaaaaaatgctcgataaactcaccgatcaacctggaaatctgataccaattgatgtaggtgaggtgcccgatctttcggcgagttgagataattccgatttggcggaagatgacccttgcgatccgactacgacgagcaagcccgaggcgccaatgcaatcgctgaaccaactccctgtggttaccgaccttgctgatgcgagatcggcctgatcacaaagatcgtttcctgtgcgcaatcgaagaacgaacaagaaaaagatgcgagcaatctaatctattactcgagggtggagttctgaatacacgaagacagcgcagatttgcgcgtgttcgagagtagctaaggctaacgtaaaacaaaactccaaaataaaggagacgcagctcctggataaatagagggggcgcagcccctaggggcggccaaccctaggtcgtccactatgggccgcagttgggctggtcgtctattcttctgggccctcattcttcagtagcatgacgaagttaagatctctggcacgggcccaagtgattggcccagctaatgaaggaagtggcgcttgatgtggaggtgctgctggtgtagtcgtactcatagtgatgtcctcatcactgctggtgtagtcgtactcatagtgatgtctgatgtagctgaggtgcccgatctttcggcgagtagagataattccgatttggcggaagatgacccttgcgatccgactacgacgagcaagcccgaggcgccaatgcaatcgctgaaccaactccctgtggttaccgaccttgctgatgcgagatcggcctgatcacgaagatcgtttcctgtgcgcaatcgaagaacgaacaagaaaaagaggcgagcaatctaatctattactcgagggtggagttctgaatacacgaagacagcgcagatttgcgcgtgttcgagagtagctaaggctaacgtaaaacaaaactcgggaaataaaggaggcgcagctcctgaataaatagagaggggcggccaaccctaggtcgtccattatggaccgcaattgggctggtcgtctattcttccgggccttcgttctttaacaacgtgatgtagttcaagtctcttgcacgggcccgagtcactggcccaggtggaaggggtggcgcctgggctagagaaggtgctgctggtgtagatgtgctcgtgttggtgttgatgtccgcatcatcctccccttcttgaactgaagtcgtcctcgacggcaactcctcatcttctcccgcatacggtttcaaatctgcaacattaaaactagtggaaacaccaaactccgcaggcaggtcaaggatataagcattatcattaatcttggttagtaccttaaaaggaccagcagcacgaggcatcaatttagaacggcgcaaagtaggaaaacgatcctttcttaaatgcaaccaaaccatatcaccaggttcaaaagtaacatgttttcttcctttactaccagcaacctgattttttgcattagtagcagcaatgttctgtttcgtttgttcatgtatggtaatcatttgttcaacatgtgccgaagcatctacatgtggggcgttcgcagcattaagtgaaatcaaatcaataggtgccctaggaatgtaaccataaacaatctggaaagggcacatctttgtagaagaatgcgtggcatgattgtaagcaaattcaacatgaggcaagcaatcctcccaacgtctcaaattcttgtctaaaacagccctaagcatggtagataatgttctatttactacctcagtttgtccatcagtctgagggtgacaagtagtgctaaacaacaatttagttcccaatttattccaaagagatctccaaaaatggcttagaaacttagcatcgcgatcagagactattgtttttggaataccatgtaaacgaataatttctctaaagaacaattcagcaacaatgctagcatcatcagttttatgacaaggtataaagtgagccattttagagaatctatcaacaaccacaaaaatactatccctccccttcttagttctaggcaagcccaaaacaaagtccatagagatatcaagccaaggagaagaagggacatgcaaaggcatatacaaaccatggttgttcaaccgtgacttagctttctgacaagtagtgcagcgtgcaacaaggcgctcaacatcagcgcgcatccgaggccaaaataagtgggcagccaacacctcatgtgttttgtagacgccaaaatgccccatgagaccgcctccatgtgcctcctgtaacaacaaaagacgaaccgaactagctggaacacacagcttattagcgcgaaacaggaacccatcctgtatgtgaaatttgccccatggtatcccattaatacaatggccgaaagcatctttaaaatcagcatcgtcaacatattgatccttcagagtgtccaaaccaaagattttaaaatctaattgtgacagcatggtatagcgacgagacaaagcatcagcaataacattgtccttcccgttcttgtgtttaataatgtaaggaaaggactcaatgaattcgacccatttagcatgacgacggttcagatttgtttgggtacgaatatgttttaaagcctcatgatcagaatgaattatgaactcacgatgccaaagatagtgctgccatgtatgcaaagtgcgcactaaagcgtaaagctccttatcataagtagaatatttcagactagcaccgcttaatttttcactaaaataagcaactggttttccttcttgtaacaaaacagcacctagcccaataccgctagcatcgcattcaagctcaaaaactttattaaaatcaggcaattgcaagaggggagcttgggttaacttatctttcaaagtgctgaacgctacctcctgcgaatcactccaagcaaacggcacatctttctttgtaagctcatgtagaggcgctgcaatggagctaaaatcacgaacaaatctgcggtagaaaccggcaagtccaagaaagctccgaatctgtgtgaccgtcgtcggtgtaggccactcccgaatggcagcaatcttgctgctatccacctcaatgccctgcggagtaaccacataaccaagaaacgagacacgttgcgtgcaaaatgtgcacttttccatgttaccaaacaagcgagcagcacgcaaagcatcaaaaacagcacgcaaatgttctaaatgctcctctatagacttgctgtaaataaggatatcatcgaaataaacaacaacaaacaaacctatgaaggcccatagaacttcgttcattaaacgcataaaggtgctgggagcattagtcaatccaaatggcataaccaaccattcatataaaccaaatttcgttttaaaagccgttttccattcatcaccgagtttcattctaatctgatggtaaccgctacgcaaatcaaccttagagaaaataacggcaccactaagctcatctaacatatcatcaaggcgtggaataggatatcgataacgaactgtgatgttattaatagcacgacaatctacgcacatacaccatgacccatcttactttggaacgagtaaaacaggaaccgagcaagggctaagagactcacgaatgtaatccttatcaagcagcgtctgcacctggtgctggatctccttcgtctcctctggatttgtacggtacggggcgcggttcggaagagaagcgccggggatgagatcgatctgatgctcaatgccacggaggggaggaagacccggtggtaagtccgtaggataaacatcagcatactcctgcaaaaggttaacaacagcagggggtatatccaaagacggtgcatcatcaagcggaacaagcatgcgcgagcatacaagtgcataacagggcatatgagcttca

SEQ ID NO: 388 - DNA, 5175 bp, Zea mays
  source (0)...(0): Zea mays BAC clone full insert sequence contig Ch4 bacm.pk184.c21.fis15
ctgctgcacatgttgaacaaatgattaccatacatgaacaaacgaaacagaacattgctgctactaatgcaaaaaatcaggttgctggtagtaaaggaagaaaacatgttacttttgagccaggtgatatggtttggttgcacttgagaaaggatcggtttcctactttgcgccgttctaaattaatgcctcgtgctgctggtccttttaaggtgctaacaaagattaatgataatgcttatatccttgacctgcctgcggaatttggtgtttccactagttttaatgttgcagatttgaaaccatatatggccgaggatgagttgtcgtcgaggacgacttcacttcaagaaggggaggatgatgaggacatcactatgagtacgactacaccagcagcacctccacatcaagcgccacttccttcattagctgggccaatcactcgggcccgtgccagagatcttaacttcgtcatactactgaagaatgagggcccagaagaatagacgaccagcccaactgcggcccatagtggacgacctagggttgaccgcccctaggggctgcgccccctctatttatccaggagctgcgcctcctttattttcgagttttgttttatgttagccttagctactctcgaacacgcgcaaatctgcgctgtcttcgtgtattcagaactccaccatcgagtaatagattagattgctcgcatctttttcttgttcgttcttcgattgcgcacaggaaacgatcttcgtgatcaggccgatctcgcatcagcaaggtcggtaaccacagggagttggttcagcgattgcattggcgcctcgggcttgctcgtcgtagtcggatcgcaagggtcatcttccgccaaatcagaattatctctactcgccgaaagatcgggcacctcagctacatcatactcaccattttctcttataattagcacacacttgcttgggcaatcccttcggatgtgcccaaatcctttgcattagaggcattggatgtcctttgttcttcccgtggaagcaatagaagaagatttggttacagcttgggaggatcctttccctgtctcaatagcacgagaagatgcggatttcgatggtgttgtggatgatctattggaagcatctccctgaaacacatggttagagctagcagcactagtgtggggctgccaagatgtattgcgacctgcataagtgttagttctcaagcatcgtccctggacttctctttcagccttacaagcaagatgaaataagcgagtaacattagtgtattccttgtaagctaatatatcttgaatttctcttgtcaaaccacccatgaacctagccattgcagcttcttcattttctacgagaccacacctcaacatgcctatttgtaattgttgataatactcttcaacagatttgttgccttgtctaagctgttgtaatttatgtaataaatcacgagcatgataggaaggaacaaaacgactacgcatgattctttttaaagcattccaagtttgtggtatggtacctggatgtgtagtttggtactcatgccaccaaatagaagcaaaatcagtgaattcactcgtagcagctctaacctttttatcatcagaaaaatcatagcttgcaaatttttgatctaccgacaattcccatgttagatatgcatcaggatcatattttccatcaaacggtggtatggagaatttaattcttcctagagaatcatcattttcacgtatctcacgtcgtggaggtcgaccacccaagccatggcgatcacgtcgttggtgtcgtcggtgcctaatagatcggtcatcacgctcggtgtctgctgaatactccgtagcatcatctcttgcggtaccagcaatggaaccatggccatcatcatcaccttgttgcctaccttcacgcccaacttggtccatcctatctaagcgctcaataattgctgcaagagaggtgttagtagcagcaactgttcgttccaaagtggtcaatgtgttgttggtaacaatttgtgctgtttctaattgaccaatgcgctcattggtgacttcaacatcttcattgagggcatatgtgtgcaaccttacttgacgttcgaaatgttgaatgatgcccactgttcgtggagaatgtggaggtcgcgcatttgcatcctctgccatggttagtgcaaaagagatacaaaaacaagtaatgcagcctagtagttgctatgatatggaaggataaaaactgcctcactagcaagaaatcaagctcttacaagttctcaccacgcaaagcaagtggcgctggcaaacagcaagaagaacaataacagtggctgctagcacaacctggtggtgttgtagaaaaaattgtggatttataggtggctgctaaaacaatagttccaaggaatagctagtaccacgttagccacaacaagttgaataaacgttccacaatggtgctgtgctggtcctagtctaaaccgtaatagagacgcgagccgttacacaaatgatatcaccaaatactcaaaacagcaagctgacttataaaattgtgaaacggtggcacacaaactgtctttgatttgctgcacatggaattttatctaccaatattcttactgcgattttttctcttttttggacgtgcttttttttatgatcagcgcggctttttttctgcacttgccttttcctttcccttgttttttttgaactacagctagagaactaaaaatggtgatctaaacaagatggcgcgaactcgaaactctagcagcaagaaactttggaccagcaactcgacacaaatgcagcaaccgtgaattcaacaagtcaaaaaccaagtagtaaagcaaaggctcaaaatgtttttaggtgattttctgctctaaatatatctttggcaaaagtggactgtaggtaaataaaataaggaagatggagatctctcaccgagcaacctgaaatttgataccacatgatgaacccaacgggtagaagggtgcctgatctttcgatgagagatgatggaggtggaaaacttgttggagaacgacgttggctgcccgactaccacaaccaagatggtgttgcgccttgagcgacaggtacaccgtctcctgataactacgatttagtgtggaggtcgacgttgtgctatccgactacaaccaccacaagggtgctgcgccttagcgatagttacaccggctcctattgttgctgctcttgccgtgccaagaatagccttgaacctgcaagcaatcgagaacaagcaagaacaagataacaagcaaacacgcacggatctgataaagttggggtcccgtttcaagtattcgggtggtctagccgacacacgtgtttacaaggaagtagcaaaggctaaacttacatcaaacaaaacccaagttctttggtggctgctagttgcttaaatagagaaataggaagaaggaattctggtggagtcatgaagttccctcggcagttcctggacgcctcgggtgtagtctcccattaattcttgatccaccagcaagtagacgaaaggagctttccaacaagtatttatttccattaaacggccttggaagttggaagatatgccccatttaaacttgtacttggtgctgttacgaaatcctttcgggtgcagcagcctttattgccttgttgccttctccagtccaagatggttcacctcccaaacacctgagcataataaagtcatcgcaaggctttagtacctcatttaaagaagaattagcttcaatagcaaggaacgagttcacctgataattaagtttacgtgcacgggctcgtgtcattggtccttgattagctacgaatggtgaagtggtcactggtatggttgtatcaatgatagtgatgtcctcatcagcttgtaaggctgaaagagaagtccagggacgatgctttagaactaacacttatgcaggtcgcaatacatcttggcagtcccgcactagtgctgctagctctaaccatgtgtttcagggagatgcttccaatagatcatccacaacaccatcgaaatcagcaccttctcgtgctattgagacagggaaaggatcctcccaagctgtagccaaatcttcttctattgcttccacgggaagaacaaaggacatccaatgcctccaatgcaaagaatttggtcacatccgaagggattgcccaagcaagcgtgtgctaattataagagaaaatggtgagtactgcgatttagataatgatacatatgccatgcttgctggccaagatgctgaaaaggagaatgatgatgaagagcatattgaggctgaacgtgctgaacactatgagagcctcattgtaagacgtgtcttgagtgcccaaattattaaagctgaacaaaaccagcgacacaatttcttccaaactaaatgtgtagttttggaacgatcttgtcgtattataattgatggaggaagctgcaacaacttagcaagcaccaccatggtagagaagcttgggctgaaaacgcttctgatgtagctgaggtgcccgatctttcggcgagtagagataattccgatttggcggaagttgacccttgcgatccgactacgacgagcaagcccgaggcgccaatgcaatcgctgaaccaactccctgtggttaccgaccttgctgatgcgagatcggcctgatcacgaagatcgtttcctgtgcgcaatcgaagaacgaacaagaaaaagatgcgagcaatctaatctattactcgagggtggagttctgaatacatgaagacagcgcagatttgcgcgtgttcgagagtagctaaagctaacgtaaaacaaaactcggaaaataaaggaggcgcagctcctgtataaatagagagggggcgcagcccctaggggcggccaaccctaggtcgtccattatgggccgcaattgggctggtcgtctattcttccgggccttcgttctttaacgacatgatgtagttcaattctcttgcacgggcccgagtcactggcccagggtggaaaggggtggcgcctggactggggaagatggtgcctgggctggagaaagtgctgctggtgtagatgtgctcgtgttggtgttgatgtcctcatcaacgagcgcttcgt

SEQ ID NO: 389 - DNA, 4807 bp, Zea mays
  source (0)...(0): Zea mays BAC clone full insert sequence contig Ch4 bacm.pk184.c21.fis16
aggccagaaaataattatacatccaatgacccctgaccaaattttgaaagatgatcttactagggctgctaaaactgcacaacaagtcaaatcgacatcagccgcacctattaaatctgaaatcaagttgcactctcctgttttacttgctacacgtgctgattttgatgatctccatgaagctcatatgccctgttatgcacttgtatgctcgcgaatgcttgttccgcttgatgatgcaccgtctttggatataccccctgctgttgataaccttttgcaggagtatgctgatgtttatcctatggacttaccaccgggtctccctcccctccgtggcattgagcatcagatcgatctcatccccggcgcttctcttccgaaccgcgccccgtaccgtacaaatccagatgagacgaaggagatccagcgccaggtgcagacgctgcttgataagggttacattcgtgagtctcttagcccttgctcggttcctgttttactcgttccaaagaaagatgggtcatggcgtatgtgcgtagattgtcgtgctattaataacatcacagttcgttatcgatatcctattccacgccttgatgatatgctagatgagcttagtggtgccgttattttctctaaggttgatttgcgtagcggttaccatcagattagaatgaaactcggtgatgaatggaaaacggcttttaaaacaaaatttggtttatatgaatggttggttatgccatttggattgactaatgctcccagcacctttatgcgtttaatgaacgaagttctacgggccttcataggtttgtttgttgttgtttatttcgatgatatccttatttacagcaagtctatagaggagcatttagaacatttgcgtgctgtttttgacgctttgcgtgctgctcgcttgtttggtaacatggaaaagtgcacattttgcacgcaacgtgtctcgtttcttggttatgtggttactccgcagggcattgaggtggatagcagcaagattgctgccattcgggagtggcctacaccgacgacggtcacacaaattcggagctttcttggacttgccggtttctaccgcagatttgttcgtgattttagctccattgcagcgcctctacatgagcttacaaagaaagatgtgccgtttgcttggagtgattcgcaggaggtagcgttaagcactttgaaagataagttaacccaagctcccctcttgcaattgcctgattttaataaagtttttgagcttgaatgcgatgctagcggtattgggctaggtgctgttttgttacaagaaggaaaaccagttgcttattttagtgaaaaattaagcggtgctagtctgaaatattctacttatgataaggagctttacgctttagtgcgcactttgcatacttggcagcactatctttggcatcgtgagttcataatttattctgatcatgaggctttaaaacatattcgtacccaaacaaatctgaaccgtcgtcatgctaaatgggtcgaattcattgagtcctttccttacattattaaacacaagaacgggaaggacaatgttattgctgatgctttgtctcgtcgctataccatgctgtcacaattagattttaaaatctttggtttggacactatgaaggatcaatatgttgacgatgctgattttaaagatgctttcggccattgtattaatgggataccatggggcaaatttcacatacaggatgggttcctgtttcgcgctaacaagctgtgtgttccagctagctcggttcgtcttttgttgttacaggaagcgcatggaggcggtctcatggggcattttggcgtctacaaaacgcatgaggtgttggctgcccatttcttttggcctcggatgcgcgctgatgtggagcgccttgttgcacgctgcactacttgtcagaaagctaagtcacggttgaacaaccatggtttgtatatgcctttgcctgtcccttcttctccttggcttgatatctctatggactttgttttgggcttgcctagaactaagaaggggagggatagtatttttgtggttgttgatagattctctaaaatggctcactttataccttgtcataaaactgatgatgctagcattgttgctgaattgttctttagagaaattattcgtttacatggtattccaaaaacaatagtctctgatcgcgatgctaagtttctaagccatttttggagatctctttggaataaattgggaactaaattgttgtttagcactacttgtcaccctcagactgatggacaaactgaggtagtaaatagaactttatctaccatgcttagggctgttttagacaagaatttgagacgttgggaggattgcttgcctcatgttgaatttgcttacaatcatgccacgcattcttctacaaagatgtgccctttccagattgtttatggttacatccctagggcacctattgatttgatttcacttaatgctgcgaacgccccacatgtagatgctgctgcacatgttgaacaaatgattaccatacatgaacaaacgaaacagaacattgctgctactaatgctaaaaatcaggttgctggtagtaaaggaagaaaacatgttacttttgagcccagtgatatggtttggttgcacttgagaaaggatcggtttcctactttgcgtagttctaaattaatgcctcgtgctgctggtccttttaaggtgctaacaaagattaataataatgcttatatccttgacctgcctgcggaatttggtgtttccactagttttaatgttgcagatttgaaaccatatatggccgaggatgaggagttgtcgtcgaggacgacttcacttcaagaaggggaggatgatgaggacatcactatgagtacgacaccagcagcactcgagcccgtgccacttccttcattagctgggccaccatctcccctttgatcacgccacaaaccgagtcaacattgtttccttgtttttctccttcggttacgtcaaaaaaaaaacagaaaaaacaaaccgagtcaacgtccgtttccttgtttttctccttcggttacgaaaaaaaacagaaaaaaaaaccgaggcaacatcgtttccttgtttttctccttcggttacgtcaaaaaaaaaacagaaacaaaaaaaacaacgaaggagaaaggatacggttgtttcatcccggtcgtttgaaaacataacttgaggtaccttccttaaaccgggcataacttttcgctcgggtgtccgaaaaatctgaaatttttacaggagctagatgacaccattctgaggccggccaaactcaccttcggtctgtttgggttcgacaaaattgtcaaaaaaattcaggaaaataaagaaaaaaatccgtcaaagttctcgcacgcttttcagagaactttctgattttctgtagaccacatttgaactctgttttaggtgaaacttcgtgtagctcctattttgttgcttcttgtgctgagaaaaatatcaaaaaaatcatacaaaaaagaaaaacaaaatcacttgtgattcctactagtggtctcgctagtacaatatttacggtactgccattctgctagttccatccgtcctttgcacttgtggccagcaatatagtttcgtgttttgcactataattcaactttgcattattgtttggtcgtgctaatccttgacttgagtgcagcctacccagaactccacatatttctacgacgagtaggtttctgtttctccaggcaatcgctcatccaatctttcaccggttccacctgttggttgcagttcaccactgtggcttggtaagaacggataagaatttgataacagcactagtgtgagcgccttgtgagcagtacacccctgtttttgtcgtttttttggtgtttgcgctaactatggcaggagcacatgacacggtggatgcccagttgctggaagtaaagggacaagttgatggacttgctgatgacattaggatgatgcatgaacggcttgattcaacggtcacttcgacgaccgagcgtttcaaccagcttgaccttgctcaaacggcgactcgcaccacactcgacaccatcctggcacgccttgatgcgttgaccacaaagatggagcaggactacggcggtgacactgagtgggacgatggagatcgccgtggtcgtgcacgccgtgtggttcgtcatccccctaatgacttattttctaagattaaatttaaaattccaccttttaatggcaaatatgatcctgctgcatatcttgattgggagttagaggttgaacaaaaattttcatgccatgatattgctgcacattctcaggttaaagctgctattagtgaatttactgattttgctttaatttggtggcgtgagtttaaaataaaacatcccactaccattccaaccacttgggatcagttgaaagctgcgatgcgacatcgatttgtgccttcgtattatgctcgtgatttgcttaataaaatgcagcgttttcagcaaggttctcaatctgttgaggactatttccaggagttacaaaaaggtatgattcgttgtgggatattggaggacaacgacgctgctatggcacgttttcgtggtggtttaaaccgcgaaatccaagatatacttgattataaggaatattatgatatgactactttatttgaatatgcttgcaaagctgaacgtgaagtgcagggacgccgctcgaagcaatattctaacccttttgcaggac

SEQ ID NO: 390 - DNA, 4035 bp, Zea mays
  source (0)...(0): Zea mays BAC clone full insert sequence contig Ch4 bacm.pk184.c21.fis17
ccgaacgcgcagcaatattctaacccttttgcaggacgaagctcgacatccacctcagcaccagttccccctgcgccatccacgtccaccactactccacgcgagaagacgaccaaaccagccagcgctgccccacccacaggtcgtacacgggatattcagtgtcatcgctgtagaggatttggccatgtgattcgggactgcccaaacaagcgcactttactcattcgtgacgatggtgagtactcttccgctagtgattctgaagaaattgaacatgcactacttgccactgaccatgcagctaaggcggaggtacatgtcaacccgggcgacgctgataggtatgaaagtcttgttgtgcagcgtgttctcagtacacaggtcgctttgcccgagaagaatcagcgacacactctgttccatacaaagggtgttgtgcaggagcggtcaattcgcatcattatcgacagcggcagttgcaacaatttggcgagtaccatgctggtcgaaaagttgtcgttacccactcgtaagcatccaaacccatatcacattcaatggcttaatgatggtggtaaaataaaaatcacgcgttccgtgcgagttcctttctccatgggtgcttattctgattttgttgattgtgatgttattcccatggaagcatgctttttgttacttggtcgaccttggcaatatgatactaatagcttgcatcatggtcgttcgaatcattattctttcatttttaagggtcagaaaataattatacatccaatgacacctgaacaaattgttaaagatgatcttgcccgagctgctataactgctaaacaacttgatccatcgccctctgttccttctgaaattaagttgaaggctcctgttttacttgctacacgtgctgattttgatgatctacacggtgctcatttgccatgctatgcacttgtatgctctagtgtcctcatttcacttgatgatgcaccatctttggctattccccctatggttgctaaccttttgcaggagtacgctgatgtctttcccaaagacttaccaccgggtctcccaccgcttcgtggcattgagcaccagatcgacctcattcccggtgcacagcttccaaaccgcgcaccataccgtacaaatccggatgagacgaaggagattcagcgccaggtacaggcgttgcttgacaaaggatacattcgtgagtctcttagcccttgctctgttcctgtgttacttgttcccaagaaggatgggtcatggcgtatgtgtgtagactgtcgtgctattaataatatcactattcgttatcgctatcctataccacgccttgatgatatgctagatgagcttagtggtgccattatttttacgtagtggttaccaccagattagaatgaaactgggtgatgaatggaaaacagccttcaaaacgaaatttggtttatatgaatggttggttatgccgtttggattgactaatgctcccagcacttttatgcgagtgatgaatgaagttctgaggcccttcataggattgtttgtggttgtttatttcgatgatatccttatttacagcaaatctaagaaagagcatttggaacatttaagtgctgtttttgatgcattgcgtgccgcccagttattcgctaacatggaaaaatgcatcttttgcacacgacgtgtctcgtttcttggttatgttgttactccacagggcattgaggtggatagcagcaagattgctgccattcgggagtggcctacaccgacgacggtcacacaaattcggagctttcttggacttgccggtttctaccgcagatttgttcgtgattttagctccattgcagcgcctctacatgagcttacaaagaaagatgtgccatttgcttggagtgattcgcaggaggaagcgttcagcactttgaaagataagttaacccaagctcccctattgcaattgcctgattttaatacagtatttgagcttgaatgcgatgctagcggtattgggctaggtgctgttttattacaagaaggaaaaccagttgcttattttagtgaaaaattaagcggtgctagtctgaaatattctacttatgataaggagctttacgcgttagtgcgcactttacatacatggcagcactatctttggcatcgtgagttcataattcattctgatcatgaggctttaaaacatattcgtacccaaacaaatctgaaccgtcgtcatgctaaatgggtcgaattcattgagtcttttccttacattattaaacacaagaacgggaaggacaatgttattgctgatgctttgtctcgtcgctataccatgctgtcacagttagattttaaaatctttggtttgcacactgtaaaagatcaatatgttgacgatgctgattttaaagatgctttcggccattgtattaatgggaaaccatggggcaaatttcacatacaggatgggttcctgtttcgcgctaacaagctgtgtgttccagctagctcggttcgtcttttgttgttacaggaagcacatggaggcggtctcatggggcactttggcgtctacaagacacatgaggtgttggctgcccacttcttttggcctcggatgcgcgctgatgttgagcgccttgttgcacgctgcactacttgtcagaaagctaagtcacggttgaacaaccatggtttgtatatgcctttgcctgttcctacttccccttggattgatatttcgatggattttgttttgggattgcctagaactaagaaggggagggatagcatttttgtggttgttgatcgattctccaaaatggctcatttcataccttgtcataagactgatgatgctagcaatgttgctgaattgttttttagagagattattcgtttgcacggtattcccaatacaatagtctcggatcgtgatgccaagtttctgagtcatttttggagatctctgtggaataaattaggaactaaattgctgtttagcaccacttgtcaccctcagactgatggtcaaactgaggtagttaatcgaactctgtctaccatgcttagggctgttttatacaaaaatttgaaacgttgggaggattgcttacctcatgttgagtttgcttataatcatgcaacacattcttctacaaagatgtgcccttttcaaattgtttatggttacattcctagggcgcctattgctttgttttcgcttgatgctacggacgccccacacatagatgctcttgcacatgttgaacaaatgattaatctccatgaacaaactcaacaaaacattgctgctgctaatgctaaatatcagattactggtagtaaaggctggaaactagttacttttgaacctggtgatatggtttggttgcatttgagaaaggatcgttttcctactttgcgccgttctaaattgatgcctcgtgctgctggtccttttaaggtactaaccaagattaatgataatgcttatatccttgacctgcctgcggagtttggtgtttccactagttttaatgttgcagatttgaaaccgtatgcgggagaagatgaggagttgccgtcgaggacgacttcagttcaagaaggggaggatgatgaggacatcaacaccaacacgagcacatctacaccagcagcaccttctccagcccaggcaccatcttccccagtccaggcgccaccccttccacctgggccagtgactcgggcccgtgcaagagaattgaactacatcatgttgttaaagaacgaaggcccggaagaatagacgaccagcccaattgcggcccataatggacgacctagggttggccgcccctaggggctgcgccccctctctatttatacaggagctgcgcctcctttattttccgagttttgttgataccaattgatgtagctgaggtgcccgatctttcagcgagtagagataattccgatttggcggaagttgacccttgcgatccgactacgacgagcatccttcgg

SEQ ID NO: 391 - DNA, 6463 bp, Zea mays
  source (0)...(0): Zea mays BAC clone full insert sequence contig Ch4 bacm.pk184.c21.fis18
ttaggtgaaacttcgtgtagctcctatcttgttgcttcttgtgctgagaaaaatatcaaaaaattcatacaaaaaagaaaaacaaaatcacctgtgatttctactagtgcctttttggcatcactagttcaatattacggtactgccattctgttagtttcatccatcctttgcacctgtggccagcaatatagtttcgtgttttgcactataattcaactttgcattattgtttgatcgtgctaatccttgacttgagtgcagcctacccacaactccacatatttctacgacgagcaggtttctgtttctccacgcaatcgctcatccaatctttcaccggttccacctgttggttgcagttcaccactgtggcttggtaagaacggataagaacttgataacagcactagtgtgagcaccttgtgagcagtacacccatgtttttgtcgttggtttttctccttttggtgtttgcgctaactatggcaggagcacacgacatggtggatgcccagttgcaggaagtaaggggacaagttgatggacttgctgctgacattaggacgatgcatgaacggcttgattcaacgatcacttcgacgaccgagcgtttcaaccaacttgaccttgctcaaacggcgactcgcaccacacttgacaccatcctggcacgccttgatgcattgaccacaaagatggagcaggaatacggcggtgacactgagcaggacgatggagatcgccgtggtcgtgcacgtcgtgtggttcttcatccccctaatgacttattttctaagattaaatttaaaattccatcttttaatggtaaatatgatcctgctgcatatcttgattgggaattagaggtagaacagaaattttcatgccatgatattcctgctaatagcctagtgaaggctgccattagtgaatttactgattttgctttaatttggtggcgtgagtataaacaaaaacttcccattaacagtgtcattacttggacccaattaaaaactgccatgtgccacagatttgttccttcctattatgctcgtgatttgcttaacaaaatgcagcgttttcaacaagtttcacagtctattgaggaatattaccaggagttacaaaagggtatgctttgttgtggtttagttgagtcaacgctgctatggcgcgttttcgtggtggtttgaacagggaaattcaggatatacttgattataaggattattttgatataaccacattgtttgaatatgcttgcaaagctgaacgtgaagtgcagggacgacgatcaaagacatatactaactctcttgcaggccgggtccaacacacaactcaactccttccagccctgcaccttctacgcctagcactacatcgcgcacagggacgaccaagccaatggcgctccctgccaaaggcgccgcttcttccacaggacgtacacgggatattcagtgccatcgttgcagagggtttgggcatatgattggggactgcccaaacaagcgtaccttgcttatacgtgacaatggtgagtactcttcagccagtgattcagaggaaactagtcatgctatgattgccactaaccatgcagaaaatgaggaagtccacgttgatcccatcgacgccgataggtatgagagtcttgttgtgcagcgtgttctcagcacacaggttgcccaggccgaaaaaaatcagcgacacactctattccataccaagggcgtcgtgcacgaacggtcgattcgcatcatcatcgatagtggcagctgcaacaatttggcaagtatagcgttggtagagaaattatccttgcccactcacacacatccacatccgtatcacattcaatggcttaatgatggtggtaaaataaaggtaacacgttcggtacgtgtccccttttcgctgggttcttattctgattatgctgattgcgatgttattcttatggaagcatgctctttgttattgggtcgaccttggcaatatgatactgatagtttacatcatggtcgttcaaatcattattctttcatgtttaaaggccagaaaataattatacatccaatgacccctgaccaaattttgaaagatgatcttactagggctgctaaaactgcacaacaagtcaaatcgacatcagccgcacctattaaatctgaaatcaagttgcactctcctgttttacttgctacacgtgctgattttgatgatctccatgaagctcatatgccctgttatgcacttgtatgctcgcgcatgcttgttcggcttgatgatgcaccgtctttggatataccccctgctgttgttaaccttttgcaggagtatgctgatgtttatcctacggacttaccaccgggtcttcctcccctccgtggcattgagcatcagatcgatctcatccccggcgcttctcttccgaaccgctccccgtaccgtacaaatccagatgagacgaaggagatccagcgccaggtgcagacgctgcttgataagggttacattcgtgagtctcttagcccttgctcggttcctgttttactcgttccaaagaaagatgggtcatggcgtatgtgcgtagattgtcgtgctattaataacatcacagttcgttatagatatcctattccacgccttgatgatatgttagatgagcttagtggtgccgttattttctctaaggttgatttgcgtagcggttaccatcagattagaatgaaactcggtgatgaatggaaaacggtttttttaaacgaaatttggtttatatgaatggttggttatgccatttggattgactaatgctcccagcacctttatgcgtttaatgaacgaagttctacgggccttcataggtttgtttgttgttgtttatttcgatgatatccttatttacagcaagtctatagaggagcatttagaacatttgcgtgctgtttttgatgctttgcgtgctgctcgcttgtttggtaacatggaaaagtgcacattttgcacgcaacgtgtctcgtttcttggttatgtggttactccgcagggcattgaggtagatagcagcaagattgctgccattcgggagtggcctacaccgacgacggtcacacaaattcggagctttcttggacttgccggtttctaccgcagatttgttcgtgattttagctccattgcagcgcctctacatgagcttacaaagaaagatgtgccgtttgcttggagtgattcgcaggaggtagcgttcagcactttgaaagataagttaacccaagctcccctattgcaattgcctgattttaataaagtttttgagcttgaatgcgatgctagcggtattgggctaggtgctgttttgttacaagaaggaaaaccagttgcatattttagtgaaaaattaagcggtgctagtctgaaatattctacttatgataaggagctttacgctttagtgcgcactttgcatacatggcagcactatctttggcatcgtgagttcataattcattctgatcatgaggctttaaaacatattcgtacccaaacaaatctgaaccgtcgtcatgctaaatgggtcgaattcattgagttctttccttacattattaaacacaagaacgggaaggacaatgttattgctgatgctttgtctcgtcgctataccatgctgtcacaattagattttaaaatctttggtttggacactgtgaaggatcaatatgttgacgatgctgattttaaagatgctttcggccattgtattaatgggataccatggggcaaatttcacatacaggatgggttcctgtttcgcgctaacaagctgtgtgttccagctagttcggttcgtcttttgttgttacaggaggcacatggaggcggtctcatggggcattttggcgtctacaaagcgcatgaggtgttggctgcccacttcttttggcctcggatgcgcgctgatgttgagcgccttgttgcacgctgcactacttgtcagaaagctacgtcatggttgaacaaccatggtttgtatatgcctttgcctgtcccttcttctccttggcttgatatctctatggactttgttttgggcttgcctagaactaagaaggggagggatagtatttttgtggttgttgatagattctctaaaatggctcactttataccttgtcataaaactgatgatgctagcattgttgctgaattgttctttagagaaattattcgtttacatggtattccaaaaacaatagtctctgatcgcgatgctaagtttctaagccatttttggagatctctttggaataaattgggaactaaattgttatttagcactacttgtcatcctcagactgatggacaaactgaggtagtaaatagaactttatctaccatgcttagggctgttttagacaagaatttgagacgttgggaggattgcttgcctcatgttgaatttgcttacaatcatgccacacattcttctacaaagatgtgccctttccagattgtttatggttacattcctagggcacctattgatttgatttcacttaatgctgcgaacgccccacatgtagatgcttctgcacatgttgaacaaatgattaccatacatgaacaaacgaaacagaacattgctgctactaatgcaaaaaatcaggttgctggtagtaaaggaagaaaacatgttacttttgagccaggtgatatggtttggttgcacttgagaaaggatcggtttcctactttgcgccgttctaaattaatgcctcgtgctgctggtccttttaaggtgctaacaaagattaatgataatgcttatatccttgacctgcctgcggaatttggtgtttccactagttttaatgttgcagatttgaaaccatatatggccgaggatgaggagttgtcgtcgaggacgacttcacttcaagaaggggaggatgatgaggacatcactatgagtacgactacaccagcagcacctccacatcaagcgccacttccttcattagctgggccaatcactcgggcccgtgccagagatcttaacttcgtcatgctactgaagaatgagggcccagaagaatagacgaccagcccaactgcggcccatagtggacgacctagggttggccgcccctaggggctgcgccccctctatttatctaggagctgcgtctcctttattttggagttttgttttacgttaggcttagctactctcgaacacgcgcaaatctgcgctgtcttcgtgtattcagaactccaccctcgagtaatagattagattgctcgtatctttttcttgttcgttcttcgattgcgcacaggaaacgatcttcgtgatcaggccgatctcgcatcagcaaggtcggtaaccacagggagttggttcagcgattgcattggcgcctcgggcttgctcatcgtagtcggatcgcaagggtcatcttccgccaaatcggaattatctctactcgccgaaagatcgggcacctcagctacatcaagcagcacctccacatcaagcgccacttccttcattagctgggccaatcactcgggcctgtgccagagatcttaacttcgtcatgctactgaagaatgagggcccagaagaatagatgaccagcccaactgcgacccatagtggacgacctagggttggccgcccctaggggctgcgcccctctgtatttatccaggagctgcgcctcctttgttttcgagttttgttttacgttagctttagctactctcgaacacgcgcaaatctgcgctgtcttcgtgtattcagaactccaccctcgagtaatagattagattgctcgcatctttttcttattcgttcttcgattgcgcacaggaaacgatcttcgtgatcaggccgatctcgcatcagcaaggtcggtaaccacagggagttggttcagcgattgcattggcgcctcgggcttgctcgtcgtagtcggatcgcaagggtcatcttccgccaaatcggaattatctatactcgccgaaagatcgggcacctcagctacatcaagcaacacctccacatcgagcgccacttccttcattagctgggccaatcactcgagcctgtgccagagatcttaacttcgtcatgctactgaagaatgagggcccagaagaatagacgaccagcccaactgcggcccatagtggacgacctagggttggccgcccctaggggctgcgtgatgcacccagcccaggtggggttggccgaggcccaacaaattagggttgcccggagcccaacagttcattaagcacacccaactcagggaaaggcccaatcgcccaaaagactagcccaatgggggaagggtggctctcccttttaaagtggcttcctcctcccaggttaagcgaggtgggataattctgaggctcacacgggccccttcgg

SEQ ID NO: 392 - DNA, 8441 bp, Zea mays
  source (0)...(0): Zea mays BAC clone full insert sequence contig Ch4 bacm.pk184.c21.fis19
  misc_feature (1)...(8441): n = A,T,C or G
gaaccgagctagctggaacacacagcttgttagcgcgaaacaggaacccatcctgtatgtgaaatttgccccatggtttcccattaatacaatggccgaaagcatctttaaaatcagcatcgtcaacatattgatcttttacagtgtgcaaaccaaagattttaaaatctaactgtgacagcatggtatagcgacgagacaaagcatcagcaataacattgtccttcccgttcttgtgtttaataatgtaaggaaaagactcaatgaattcgacccatttagcatgacgacggttcagatttgtttaagtacgaatatgttttaaagcctcatgatcagaatgaattatgaactcacgatgccaaagatagtgctgccatgtatgtaaagtgcgcactaacgcgtaaagctccttatcataagtagaatatttcagactagcaccgcttaatttttcactaaaataagcaactggttttccttcttgtaatanaacagcacctagcccaataccgctagcatcgcattcaagctcanatactgtattanaatcaggcaattgcaataggggagcttgggttaacttatctttcagagtgctgaacgcttcctcctgcgaatcactccaagcaaatggcacatctttctttgtaagctcatgtagaggcgctgcaatggagctaaaatcacgaacaaatctgcggtagaaaccggcaagtccaagaaagctctgaatttgtgtgaccgtcgtcggtgtaggccactcccgaatggcagcaatcttgctgctatccacctcaatgccctgtggagtaacaacataaccaagaaacgagacacgtcgtgtgcaaaagatgcatttttccatgttagcgaataactgggcggcacgcaatgcatcaaaaacatcacttaaatgttccaaatgctctttcttagatttgctgtaaataaggatatcatcgaaataaacaaccacaaacaatcctatgaagggcctcagaacttcattcatcactcgcataaaagtgctgggagcattagtcaatccaaacggcataaccaaccattcatataaaccaaatttcattttgaaggctgttttccattcatcacccagtttcattctaatctggtggtaaccactacgcaaatcaatcttagtaaaaataatggcaccactaagctcatctagcatatcatcaaggcgtggtataggatagcgataacgaatagtgatattattaatagcacgacagtctacacacatacgccatgacccatccttcttgggaacaagtaacacaggaacagagcaagggctaagagactcacgaatgtatcctttgtcaagcaacgcctgtatctggcgctgaatctccttcgtctcatccggatttgtacggtatggtgcgcggtttggaagctgtgcaccgggaatgaggtcgatctggtgctcaatgccacgaagcggtgggagacccggtggtaagtctttgggaaagacatcagcgtactcctgcaaaaggttagcaaccatagggggaatagccaaagatggtgcatcatcaagtgaaatgaggacactagagcatacaagtgcatagcatggcaaatgagcaccgtgtagatcatcaaaatcagcacgtgtagcaagtaaaacaggagccttcaacttaatttcagaaggaacagagggcgatggatcaagttgtttagcagttatagcagctcgggcaagatcatctttaacaatttgttcaggtgtcattggatgtataattattttctaacccttaaaaatgaaagaataatgattcgaacgaccatgatgcaagctatcagtatcatattgccaaggtcgaccaagtaacaaagagcatgcttccatgggaataacatcacaatcaacaaaatcagaataagcacccatggagaaaggaactcgcacggaacgcgtgatttttattttaccaccatcattaagccattgaatgtgatatgggtttggatgcttacgagtgggtaacgacaacttttcgaccagcatggtactcgccaaattgttgcaactgccgctgtcgataatgatgcgaattgaccgctcctgcacaacaccctttgtttggaacagagtgtgtcgctgattcttctcgggcaaagcgacctgtgtactgagaacacgctgcacaacaagactttcatacctatcagcgtcgcccgggttgacatgtacctccgccttagctgcatggtcagtggcaagtagtgcatgttcaatttcttcagaatcactagcggaagagtactcaccatcgtcacgaatgagtaaagtgcgcttgtttgggcagtcccgaatcacatggccaaatcctctacagcgatgacactgaatatcccgtgtacgacctgtgggtggggcagcgctggctggtttggtcgtcttctcgcgtggagtagtggtggacgtggatggcgcagggggaactggtgctgaggtggatgtcgagcttcgtcctgcaaaagggttagaatattgcttcgagcggcgtccctgcacttcacgttcagctttgcaagcatattcaaataaagtagtcatatcataatattccttataatcaagtatatcttggatttcgcggtttaaaccaccacgaaaacgtgccatagcagcgtcgttgtcctccaatatcccacaacgaatcatacctttttgtaactcctggaaatagtcctcaacagattgagaaccttgctgaaaacgctgcattttattaagcaaatcacgagcataatacgaaggcacaaatcgatgtcgcatcgcagctttcaactgatcccaagtggttggaatggtagtgggatgttttattttaaactcacgccaccaaattaaagcaaaatcagtaaattcactaatagcagctttaacctgaaaatgtgcagcaatatcatggcatgaaaatttttgttcaacctctaactcccaatcaagatatgcagcaggatcatatttgccattaaaaggtggaattttaaatttaatcttagaaaataagtcattagggggatgacgaaccacacggcgtgcacgaccacggcgatctccatcgtcccactcagtgtcaccgccgtagtcctgctccatctttgtggtcaacgcatcaaggcgtgccaggatggtgtcgagtgtggtgcgagtcgccgtttgagcaaggtcaagctggttgaaacgctcggtcgtcgaagtgaccgttgaatcaagccgttcatgcatcgtcctaatgtcatcagcaagtccatcaacttgtccctttacttctagcaactgggcatccaccctgtcatgtgctcctgccatagttagcgcaaacaccaaaaaaacgacaaaaacaggggtgtactgctcacaaggcgctcacactagtgctgttatcaaattcttatccgttcttaccaagccacagtggtgaactgcaaccaacaggtggaaccggtgaaagattggatgagcgattgcctggagaaacagaaacctactcgtcgtagaaatatgtggagttctgggtaggctgcactcaagtcaaggattagcacgaccaaacaataatgcaaagttgaattatagtgcaaaacacgaaactatattgctggccacaagtgcaaaggacggatggaactagcagaatggcagtaccgtaaatattgtactagtgatgccaaaaagggtttccaggttgatcggtgagtttatcgagcgttttttttcctacagtccacaaaaccgcataaaaattcaggttagatcttatcccagcacccttttgagcctcgcactttctttcaataatctgcattgttgaatttgtgtgctttcgcgtcatttgttgctggttgcattgtgttcttccaccattcaaaccctagcgccgccaccatctcccgtttgatcatgccacaaaccgagtcaacattgtttccttgtttttctccttcggttacgtcaaaaaaaaaacagaaaaaacaaaccgagtcaacggccgtttccttgattttctccttcggttacgaaaaaaaacagaaaaaaaacaaaccgagtcaacgaccgcttccttgtttttctccttcagttacataaaaaaaaaaacagaaacaaaaaaaacgaaggagaaaggatacgtttgtttcatccccggtcgtttttaaaacataacttgaggaaccttccataaaccgggcataacttttcgctcgggtgtccaaaaaatctgaaatttttacaggagctagttgacaccattctgaggccggccaaactcacctacggtctgtttgggtttcgacaaaattgtcaaaaaaattcaggaaaataaagaaaaaaatccgtcaaagttctcgcacgcttttcagagaacttcctgattttctatagaccacatctgatatctgttttaggtgaaacttcgtgtagctcctatcttgttgcttcttgtgctgagaaaaatatcaaaaaaatcatacaaaaaagaaaaacaaaatcacctgtgatttctactagtgcctttttggcatcactagtacaatatttacggtactgccattctgctagttccatccatcctttgcacctgtggccagcaatatagtttcgtgttttgcactataattcaactttgcattattgtttgatcgtgctaatccttgacttgagtgcagcctacccaaaactccacatatttctacgacgagaaggtttctgtttctccaggcaatcgctaatccaatctttcaccggttccacctgttggttgcagttcaccactgtggcttggtaagaacggataagaacttgataacagcactagtgtgagcgccttgtgagcagtacacccctgtttttgtcgttggtttttttctccttttggtgttttggtgtttgcgctaactatggcaggagcacacgacatggtggatgcccagttgcaggaagtcaggggacaagttgatggacttgctgctgacattagaacgatgcatgaacgacttgattcaacggtcacttcgacgaccgagcgtttcaaccaacttgaccttgctcaaacggcgactcgcaccacactcgacaccatcctggcacgccttgatgcattgaccacaaagatggagcaggaatacggcggtgacactgagcaggacgatggagatcgccgtggtcgtgcacgtcgtgtggttcgtcatccccctaatgacttattttctaagattaaatttaaaattccatcttttaatggtaaatatgatcctgctgcatatcttgattaggaattggaggtagaacagaaattttcatgccatgatattcctgctaatagccaagtgaaggctgccattagtgaatttactgattttgctttaatttggtggcgtgagtataaacaaaaacttcccattaacagtgtcattacttggacccaattaaaaactgccatgcgccacagatttgttccttcctattatgctcgtgatttgcttaacaaaatgcagcgttttcaacaaggttcacaatctgttgaggaatattaccaggagttgcaaaagggtatgcttcgttgtggtttggttgagtcagatgacgctgctatggcgcgttttcgtggtggtttgaacagggaaattcaggatatacttgattataaggattattttgatataaccacattgtttgaatatgcttgcaaagctgaacgtgaagtgcagggacgacgatcaaagacatatactaactcttttgcaggccggggtccaacacacagctcaactccttccagtcctgcaccttctacgcctagcactacatcgcgcacagggacgaccaagccagtggcgccccctgccaaaggcgccgcttcttccacaggacgtacacgggatattcagtgccatcgttgcagagggtttgggcacatgattcgggactgcccaaacaagcgtaccttgcttatacgtgacaatggtgagtactcttcagccagtgattctgaggaaactagtcatgctatgattgccactaaccatgcagaaaatgaggaagtccacgttgatcccatcgacgccgataggtatgagagtcttgttgtgcagcgtgttctcagcacacaggttgcccaggccgaaaaaaatcagcgacacactctattccataccaagggcgtcgtgcacgaacggtcgattcgcatcatcatcgatagtggcagctgcaacaatttggcaagtacagcgttggtagagaaattatccttgcccactcgcacacatccacatccgtatcacattcaatggcttaatgatggtggtaaaataaaggtaacatgtttggtacgtgtccccttttcgctgggttcttattctgattatgctgattgcgatgttattcctatggaagcatgctctttgttattgggtcgaccttggcaatatgatactgatagtttacatcatggtcgttcaaatcattattctttcatgtttaaaggccagaaaataattatacatccaatgacccctgaccaaattttgaaagatgatcttactagggctgctaaaactgcacaacaagtcaaatcgacatcagccgcacctattaaatctgaaatcaagttgcactctcctgttttacttgctacacgtgctgattttgatgatctccatgaagctcatatgccctgttatgcacttgtatgctcgcgcatgcttgttccgcttgatgatgcaccgtctttggatataccccctgttgttgttaaccttttgcaggagtatgctgatgtttatcctacggacttaccaccgggtctccctcccctctgtggcgttgagcatcagatcgatctcatccccggcgcttctcttccgaaccgcgccccgtaccgtacaaatccagaggagacgaaggagatccagcgccaggtgcagacgctgcttgataagggttacattcgtgagtctcttagcccttgctcggttcctgttttactcgttccaaagaaagatgggtcatggcgtatgtgcgtagattgtcgtgctattaataacatcacagttcgttatcgatatcctattccacgccttgatgatatgttagatgagcttagtggtgccgttattttctctaaggttgatttacgtagcggttaccatcagattagaatgaaactcggtgatgaaaggaaaacgacttttaaaacgaaatttggtttatatgaatggttggttatgccatttggattgactaatgctcccagcacctttatgcgtttaatgaacgaagttctacgggccttcataggtttgtttgttgttgtttatttcgatgatatccttatttacagtaagtctatagaggagcatttagaacatttgcgtgctgtttttgatgctttgcgtgctgctcgcttgtttggtaacatggaaaagtgcacattttgcacgcaacgtgtctcgtttcttggttatgtggttactccgcagggcattgaggtggatagcagcaagattgctgccattcgggagtggcctacaccaacgacggtcacacaaatttggagctttcttggacttgccggtttctaccacagatttgttcgtgattttagctccattgcagcgcctctacatgagcttacaaataaagatgtgccgtttgctttgagtgattcgcaggaggtagcgttcagcactttgaaagataagttaacccaagctcccctcttgcaattgcctgattttaataaagtttttgagcttgaatgcgatgctagcggtattgggctaggtgctgttttgttacaagaaggaaaaccagttgcttattttagtgaaaaattaagcggtgctagtctgaaatattctacttttatgataaggagctttatgctttagtgcgcactttgcatacatggcagcactatctttggcatcgtgagttcataattcattctgatcatgaggctttaaaacatattcgtacccaaacaaatctgaatcgtcgtcatgctaaatgggtcgaattcattgagtcctttccttacattattaaacacaagaacgggaaggacaatgttattgctgatgctttgtctcgtcgctataccatgctgtcacaattagattttaaaatctttggtttggacactgtgaaggatcaatatgttgacgatgctgattttaaagatgctttcggccattgtattaatgggataccatgggacaaatttcacatacaggatgggttcctgtttcgcgctaacaagttgtgtgttccagctagttcggttcgtcttttgttgttacaggaggcgcatggaggcggtctcatggggcattttggcgtctacaaaacgcatgaggtgttggctgcccacttcttttggccgctttcg

SEQ ID NO: 393 - DNA, 6634 bp, Zea mays
  source (0)...(0): Zea mays BAC clone full insert sequence contig Ch4 bacm.pk184.c21.fis20
ccccacccccctttttttcggaaatggggtggacgggcgggcaaacgaaaattggcgcggaaaccccctcctcaccattgtttttttgaacctaaaattagggggttggggcatgttcgtttgcgaaaaacaaagaaaatggtttccggcggcaaaaactccgtgcttgtatgcacccccgacccccttttttggatggggtgacgtgcggcaacgaatttgcgcggaaccactcctcaacatgtgttttggccctaaagtagtggatggggcatgttcgttgcaaaaaacgaagtaatggttccggtggcaaaaactcgtgctttgtatgcaccccgacacccgttttcggaatgggtgacgtgcggcaatgaaattgcgcgaaaccactccaaacatttgttttggacctgaagtagtggattgggcatgttcgttgcgaaaaacgaagaaatggttccggtggcaaaaactcgtgcttgtatgcaccccgacacctgttttcggaatgggtgacgtgcggcaatgaaatcgcgcgaaaccaccccaaacatgtattttggacctaaagtagtggattgatgttcgttgcgaaaaacgaagaaacggtaccggtggcaaaaactcgtgctttgtatgcaccccgacacccgttttcggaatgagtgatgtgcggcaacgaaattgcgcgaaaccaccccaaaaatgagttttggacctaaaatagtggattgggcatgttcgttgcgaaaaacgaagaaatggttccggtggcaaaaactcgtgcttgtatgcaccccgacacccgtcttcggaatgggtgacgtgcggcaacaaaattgcgcgaaaccaccccaaacatgtgttttggacctaaagtagtggattgggcatgttcgttgcgaaaaacgaagaaatggttccggtggcaaaaactcgtgtttgtatgcaacccgacacccgttttcggaattggttacgtgcggcaataaaattgcgcgaaaccaccccaaacatgtgttttggacctaaaatagtggattcggcatgttcgttgcgaaaaacgaagaaatggttccggtggcaaaaactggtgcttgtatgcacccgacacctgttttcagaatgggtgacgtgctgcaacgaaattgtgcgaaaccaccccaaacatgcgttttggacctaaagtagtggattgggcatgttcgttgggaaaaaacgaaaatattgttcctgtggcaaaaactcgcgctttgtatgcaccccgacacccgttttcggaatgagtgacgtgcggcaacgaaattgcgcgaaaccaccccaaacatgagttttggacctaaagtagtggattgggcatgttcgttgcgaaaaacgaagaaatggttccagtggcaaaaactcgtgcttgtatgcaccccgacacccgttttcggaatgggtgacgtgcggcaatgaaattgcgcgaaaccaccgcaaacatgagttttggacctaaagtagtggattggttatgttcgttgcgaaaaacgaagaaatggttccggtggcaaaaactcgtgcttgtatgcaccccgacacccgttttcggaatgggtgacgtgcgacaatgaaatcacgcgaaaccgctgcaataaaattgtgcgaaaccaccccaaacatgtgttttggacctaaagtagtggattcggcatgttcgttgcgaaaaacgaagaaatggttccggtggcaaaaactcgtgcttgtatgcacccgacacccgttttcggaatgggtcacgtacggcaaaaaaattgcgcgaaaccaccgcaaacatgagttttggacctaaagtagtggattgggcatgttcgttgcgaaaaacgaagaaatggttccggtggcaaaaactcgtgcttgtatgcaccccgacacccgttttcggaatgggtgacgtgcgggaatgaaattgcgcgaaactaccccaaacatgtgttttggacctaaagtagtggattgggcatgttcgttgcgaaaaacgaagaaatggttccggtggcaaaaactcgtgcttgtatgcaacacgacacctgttttcggaatgggtgacgtgcggcaacgaaattgtgcgaaaccaccccaaacatgcgttttggacctaaagtagtggattgggcatgttcgttgggaaaaaacgaaaatattgttcctgtggcaaaaactcgcgctttgtatgcaccccgacacccgttttcggaatgagtgacgtgcggcaacgaaattgcgcgaaaccaccccaaacatgagttttggacctaaagtagtggattgggcatgttcgttgcgaaaaacgaagaaatggttccagtggcaaaaactcgtgcttgtatgcaccccgacacccgttttcggaatgggtgacgtgcggcaatgaaattgcgcgaaaccaccgcaaacatgagttttggacctaaagtagtggattggttatgttcgttgcgaaaaacgaagaaatggttccggtggcaaaaactcgtgcttgtatgcaccccgacacccgttttcggaatgggtgacgtgcgacaatgaaatcacgcgaaaccgctgcaataaaattgtgcgaaaccaccccaaacatgtgttttggacctaaagtagtggattcggcatgttcgttgcgaaaaacgaagaaatggttccggtggcaaaaactcgtgcttgtatgcacccgacacccgttttcggaatgggtcacgtacggcaatgaaattgcgcgaaaccaccgcaaacatgagttttggacctaaagtagtggattgggcatgttcgttgcgaaaaacgaagaaatggttccggtggcaaaaactcgtgcttgtatgcaccccgacacccgttttcggaatgggtgacgtgcgggaatgaaatcgcgcgaaactaccccaaacatgtgttttggacctaaagtagtggattgggcatgttcgttgcgaaaaacgaagaaatggttccggtggcaaaaactcgtgcttgtatgcaacccgacacccgttttcggaattggttacgtgcggcaataaaattgcgcgaaaccaacccaaacatgtgttttggacctaaaatagtggattcggcatgttcgttgcgaaaaacgaagaaatggttccggtggcaaaaactggtgcttgtatgcacccgacacctgttttcagaatgggtgacgtgctgcaacgaaattgtgcgaaaccaccccaaacatgcgttttggacctaaagtagtggattgggcatgttcgttgggaaaaaacgaaaatattgttcctgtggcaaaaactcgtgctttgtatgcaccccgacacccgttttcggaatgggtgacgtgcggcaatgaaattgcgcgaaaccaccgcaaacatgagttttggacctaaagtagtggattggttatgttcgttgcgaaaaacgaagaaatggttccggtggcaaaaactcgtgcttgtatgcaccccgacacccgttttcggaatgtgtgacgtgctgcaacgaaattgtgcgaaaccaccccaaacatgagttttggacctaaagtagtggattgggcatgttcgttgcgaaaaacgaagaaatggttccggtggcaaaaactcgtgcttgtatgcaccccgacacccgttttcggaatgggtgacgtgcggcaatgaaatcgcgcgaaaccacccccaaacatgtgttttggaccaaaagtagtggattgggcatgtacgttgcgaaaaacgaagaaatggttccggtggcaaaaactcgtgcttgtatgcaccccgacacctgttttcggaattggtgacgtgcggcaataaaattgcgcgaaaccacccgaaacattggttttggacctaaaatagtggattgggcatgttcgttgcgaaaaacgaagaaatggttcctgtggcaaaaactcgtgctttgtatgcaccccgacacccgttttcggaatgggtgacgtgtggcaacgaaattgcgcgaaaccaccccaaacatgagttttggacctaaagtagtggattgggcatgttctttgcaaaaaacaaagaaatggttccgttggcaaaaactcgtgctttgtatgcaccccgacacccgttttcggaatgggtgacgtgcggcaacgaaattgcgcgaaaccaccccaaacatgagttttggacctaaagtagaggattgggcatgttcgttgcgaaaaacgaagaaatggttccggtggcaaaaactcgtgctttgtatgcaccccgacacccgttttcggaatgggtgacgtgcggcaacgaaattgcgcgaaaccaccccaaacatgagttttggacctaaagtagtggattgggcatgttcgttgcgaaaaacgaagaaatggttccggtggcaaaaactcgtgcttgtatgcaccccgacacccgttttcggaatgggtgacgtgcggcaatgaaatcgcgcgaaaccaccccaaaaatgtgttttggacctaaagtagtggattgggcatgttcgttgcgaaaaacgaagaaatggttccggtggcaaaaactcgtgcttgtatgcaccccgacacctgttttcggaattggttacgtgcggcaataaaattgcgcgaaaccacccgaaacattggttttggacctaaaataatggattgggcatgttcgttgcgaaaaacgaagaaatggttccggtggcaaaaactcgtgcttgtatgcaccccgacacccgttttcggaatgtgtgacgtgctgcaatgaaattgcgcgaaaccaccgcaaacatgtgttttggacctaacgtagtggattggttatgttcgttgcgaaaaacgaagaaatggttccggtggcaaaaactcgtgcttgtatgcaccccgacacccgttttcggaatgggtgacgtgcgactatgaaatcacgcgaaaccgctgcaataaaattgtgcgaaaccaccccaaacatgtgttttggacctaaagtagtggattcggcatgttcgttgcgaaaaacgaagaaatggttccggtggcaaaaactcgtgcttgtatgcacccgacacccgttttcggaatgggtcacgtacggtaatgaaattgcgcgaaaccaccgcaaacatgagttttggacctaaagtagtggattgggcatgttcgttgcgaaaaacgaagaaatggttccggtggcaaaaactcgtgcttgtatgcaccccgacacccgttttcggaatgggtgacgtgcgggaatgaaatcgcgcgaaactaccccaaacatgtgttttggacctaaagtagtggattgggcatgttcgttgcgaaaaacgaagaaatggttccggtggcaaaaactcgtgcttgtatgcaacccgacacccgttttcggaattggttacgtgcggcaataaaattgcgcgaaaccaacccaaacatgtgttttggacctaaaatagtggattcggcatgttcgttgcgaaaaacgaagaaatggttccggtggcaaaaactggtgcttgtatgcacccgacacctgtttacagaatgggtgacgtgctgcaacgaaattgtgcgaaaccaccccaaacatgcgttttggacctaaagtagtggattgggcatgttcgttgggaaaaaacgaaaatattgttcctgtggcaaaaactcgtgctttgtatgcaccccgacacccgttttcggaatgagtgacgtgcggcaacgaaattgcgcgaaaccaccccaaacatgagttttggacctaaagtagtggattgggcatgttcgttgcgaaaaacgaagaaatggttccggtggcaaaaactcgtgcttgtatgcaccccgacacccgttttcggaatgggtgacgtgcggcaatgaaattgcgcgaaaccaccgcaaacataagttttggacctaaagtagtggattggttatgttcgttgcgaaaaacgaagaaatggttccggtggcaaaaactcgtgcttgtatgcaccccgacacccgttttcggaatgggtgacgtgcgacaatgaaatcgcgcgaaaccgctgcaataaaattgtgcgaaaccaccccaaacatgtgttttggacctaaagtaatggattcggcatgttcgttgcgaaaaacgaagaaatggttccggtggcaaaaactcgtgctttgtatgcaccccgacacccgttttctgaatgagtgacgtgcggcaacgaaattgcgcgaaaccaccccaaacatgagttttggacctaaagtagtggattgggcatgttccttgggaaaaacaaagaaatggttccggtggcaaaaactcgtgtttgtatgcacccccgacacccgttttcggaatgggtgacgtgcggcaatgaaattgcgcgaaaccaccgcaaacatgagttttggacctaaagtagtggattgggcatgttcgttgcgaaaaacgaagaaatggttccggtggcaaaaactcgtgcttgtatgcaccccgacacccgttttcggaatgggtgacgtgcgggaatgaaatcgcgcgaaactaccccaaacatgtgttttgaacctaaagtagtggattgggcatgttcgttgcgaaaatcaagggaaacgataccgtcgacctcgccctgttgtatttta

SEQ ID NO: 394 - DNA, 15867 bp, Zea mays
  source (0)...(0): Zea mays BAC clone full insert sequence contig Ch4 bacm.pk184.c21.fis21
  misc_feature (1)...(15867): n = A,T,C or G
cgccagcgttggcgcattttcgcaagaagaaaactttataagaggtaaccccgaaggtcccctggaatggatcaatcatgaggcggaggcctttgaagaaattttaaatagtcgcggagacatctgcgctttttctggtgccagagggattgccactattttggaggggaaaggatgtgaacatgtaaagattttatcgcagtccgaagccaccttgtccactgaagatataaaagatccttcagccgaagctagcgcggttgggggaaaatttttcaccgacatctgggacaacggtggtagagaaatggcccaagaaatcattcacaaaagcgagaaagggattcatgaggctagaaaagtagccgaggctgctgagaaaaacgcagagcccgaagggcaaataggtactaacgaatagttttcattgcattataacttttaattttatagttcgttcgcgatctgtaataatgatgtaatagtatcccgtcctcactcagttcctactaaagcatcttcgggccctcagcctaaagatgacgacgaaattaaaaagatggccgaagctatcatggatcaagttgtcgatcgactgctgaacgaagctgcagagatagtacttagggaagactaagtgctattggagaaaacatttgatatatgatttgtgtaatattctgtaatcctgtatgtaatatacttgttttatgattcaattctttacgatgcatgaaactttaaacacgtaccatttttgagtcttcgacgaaaaaacaccttcccttcttttcatgcttcgtgaagaagaatttatcatttatcacgacaatatccatagtgttctgataagaaatatccaagcttcgtaaaaataatctccgaagctatacctcgaaaatcaatattgtttctccctgtaacttggcatgatttgccctttttcaaagcattttccgaagatcgataacatgcccccttcttgtgccacatgcagcatgatgtatgatgattatgctatgcaaaatgatgtgatgatgttatgttatgcaaaatgatattttgtgccgaagatacgcacattcctgcaatggggcacaatcttttgtatcaatactgactttttcattataagcctcccttaggagcttcttcgccttttacttcagcggaatcagcgtttatttttcgctgtaagttctgcatccccttaggaacgtctttggaacttcttcgccttttacttaggcggtataagctctgcattcccttaggaacgtctttggagcttcttcgccttttacttaggcggtatcagcgttgacttttcgctgtatgctctgcattccttttggaacgactttggagcagaaaacttacactgcgctcccttcggaacgactttttgtgacttcgtcagacttactctgcgttccttagaacgactttttgttgcttcgaaggattttcgatagtccgaaggtcctttttattatcacaaacctgtgaagaaaacatatttttcttgtaggaatcaacgaaactaattacatgaaacctaaacaatgtcctttattacaaaaaataaaactgaatgaaaaagattgctattaaggtaggatatttgtcaatagatgtgttttgactctggcacggtgctgttgaccgtgcgagcttcggactgttctctgaagtccctttgatgtggagcatattggctcccttctggctgctggccttgttgcaacggaggtggaggcgggggctgttgccaggaagctgaaggctgacttgccgaagcagcagagactgcaggatggttgcccacatattctgggatgtagggcgaatgatacgaagcagtgtgcatgacctgcttcggctgagcctgttgcgcggcagcttcggctatctctttttgcttttgaatggtaacatgacacatcctggtagtatgacctttgttttcaccacagaataagcaaaatattcttctgggttgatccccgaatcttccgccgaagcccctggcgcctctgcctcttggagctggtggtcggaaggagctttgctgttgccccgaagcctgtgaggagtactgtggcctttgctgctggctccccttatcatcattttgattggaattatgaattgatctgacatgcctcggatagaatcttcctccgaagcccctggtcatctcagaaaatctgaaggcctcctcccttctttggcgaaaatcattgtcagctcgaatatattcatccatcttctggagcagcttctccagcgtttgtggtggcttcctggcaaaatactgcgctgatggccctggccgaagccccttgatcatggcctcaatgacaatctcattgggcactgtcggcgcctgtgcccttagacgcagaaaccttcggacatatgcctgaaggtattcttcgtggtcctgggtgcactggaaaagggcctgagcagtgaccggctttgtttgaaacccttggaaactagttatgagcatatccttcagtttctgccaagaagtgattgtccctggccgaagagaagagtaccaggtctgagcaacacctctgacggccatgacgaaggattttgccatgactgccgtattgccaccgtatgaagatattgttgcctcgtagctcattaggaattgcttcgggtctgagtgaccgtcatatatgggaagctggggtggcttgtaagtctgtggccaaggtgtagcctgcaattctgttgaaagaggagaagcatcatcaaaagcaaagtttccatgatggagatcttcataccagtcgtcttcattgcggaaatcttcctgatgaagctctctgcgtggaggccttcgggtttgatcgccttgaacgaaatgacggacctcttccgaagcttcatctatctgtctctgaagatcagctagacgagccatcttttccttcctgcgctgaacttgttgctgaaggatctctaaattttgaatttcctgatcaagatcatcatccggaggtgttggactgacagccttccttttctggcttcgggcttctctaagagaaataacatcctgattgggatccagcgactgcagtgtgccagctcctgttgttgaagccttcttcggcggcatgacgaaggtgacgctcgccgaaggtattcaaagctcaagaaatggaagtgagttcaccggaggtgggcgccaatgttggggacttgttctcaagtgctaagagtttaagaacaaggcaacatagaaaatgttaatcgttaatgcccttcgtccttcgaagcactatttcccttaggacataatgccttgcggacgaaggttatgaaggacataccttcataaattaatcaaataatgacgaaggatgaaatgtgaagaatgtaaaggaaaacatgaacaatcatttattattattgaacataaacaaaaatattattgaacaacaagtgtaccttcaatcggaaggaaatgattgtacaagcgtgacgcaaaaagcgaatgccaagtcagcgtgaacagtacagggatactgttcacctatttatagacacgggacacagcccttacaaaattacattcatgccctttacatctaacaataactctatagtaatctattgaggtctgaatagccttttcatctttaagtcggttccactctctgctgttacgccgaagctttcctgctcaacagcttcggctctgtatcaagcttcgtattattccggtctgctgcaatgccgattttagtctgagggtacctgttcacatattgtactacagaaatactgttaaattctgtttttgaggaccttcggacgccgaaggtccccaacaagttacaaaagggtatgcttcgttgtggtttggttgagtcggatgacgctgctatggcgcgttttcgtggtggtttgaacagggaaattctggatatacttgattataaggattattttgatataaccacattgtttgaatatgcttgcaaagctgaatgtgaagtgcagggacgacgatcaaagacatatactaactcttttgcaggccggggtccaacacacagctcaactccttccagccctgcaccttctacgcctagcactacatcgcgcacaaggacgaccaagccagtggcgccccctgccaaaggcgctggttcttccacaggacgtacacgggatattcagtgccatcgttgcagagggtttgggcacatgattcgagactgcccaaacaagcgtaccttgcttatacgtgacaatggtgagtactcttcagccagtgattctgaggaaactagtcatgctatgattgccactaaccatgcagaaaatgaggaagtccacgttgatcccatcgacgccgataggtatgagagtcttgttgtgcagcgtgttctcagcacacaggttgcccaggccgaaaaaaatcagcgacacactctattccataccaagggcgtcgtgcacgaacggtcgattcgcatcatcatcgatagtggcagctgcaacaatttggcaagtacagcgttggtagagaaattatccttgcccactcgcacacatccacatccgtatcacattcaatggcttaatgatggtggtaaaataaaggtaacacgttcggtacgtgtccccttttcgctgggttcttattctgattatgctgattgcgatgttattcctatggaagcatgctctttattattaggtcgaccttggcaatatgatactgatagctgncatcatggtcgttcgaatcattattctttcattttaagggtcagaaaataattatacatccaatgacacctgaacaaattgttaaagatgatcttgcccgagctgctataactgctaaacaacttgatccatcgccatctgctccttctgaaatcaagttgaaggctcctgttttacttgctacacgtgctgattttgatgatctacacggtgctcatttgccatgctatgcacttatatgctctagtgtcctcatttcacttgatgatgcaccatctttggctattccccctatggttgctaaccttttgcaggagtacgctgatgtctttcccaaagacttaccaccgggtctcccaccacttcgtggcattgagcaccagatcgacctcattcccggcgcacagctgccgaaccgcgcaccgtaccgtacaaatccggatgagacgaaggagattcagcgccaggtacaggcgttgcttgacaagggatacattcgtgagtctcttagcccttgctctgttcctgtgttacttgttcccaagaaagatgggtcatggcatatgtgtgtagactgtcgtgctattaataacatcactattcgttatcgatatcctataccacgccttgatgatatgctagatgagcttagtggtgccattattttcactaagattgatttgcgtagtggttaccaccagattagaatgaaactgggtgatgaatggaaaacggcttttaaaacaaaatttggtttatatgaatggttggttatgccgtttggattgactaatgctcccagcacttttatgcgagtgatgaatgaagttctaaggcccttcataggattgtttgtggttgtttattttgatgatattcttatttacagcaaatctaagaaagagcatttggaacatttacgtgctatttttgatgcattgcgtgctgcccagttatttgctaacatggaaaaatgcatcttttgtacatgacgtgtctcgtttcttggttatgttgttactccacagggcattgaggtggatagcagcaagattgctgccattcgggagtggcctacaccgacgatggtcacacaaattcggagctttcttggacttgccggtttctaccgcagatttgttcgtgattttagctccattgcagcgcctctacatgagcttacaaagaaagatgtgccatttgcttggagtgattcccaggaggaagcgttcagcactttgaaagataagttaacccaagctcctctattgcaattgcctgattttaataaagtgtttgagcttgaatgcgatgctagcggtattgggctaggtgctgttttgttacaagaaggaaaaccagttgcttattttagtgaaaaattaagcggtgctagtctgaaatattctacttatgataaggagctttacgctttagtgcgcactttgcatacatggcagcactatctttggcatcgtgagtttataatccattctgatcatgaggctttaaaacatattcgcccaaacaaatctgaaccgtcgtcatgctaaatgggtagaattcattgagtcctttccttacattattaaacacaagaacgggaaggacaatgttattgctgatgctttgtctcgtcgctataccatgttgtcacagttagattttaaaatctttggtttgcacactgtgaaagatcaatatgttgatgatgctgattttaaagatgctttcggccattgtattaatgggaaaccatggggcaaattttacatacaggatgggttcctgtttcgcgctaacaagctgtgtgttccagctagctcggttcgtcttttgttgttacaggaagcacatggaggcggtctcatggggcactttggcgtctacaagacacatgaggtgttggctgcccacttcttttggcctcgaatgcgcgctgatgttgagcgccttgttgcacgctgcactacttgtcagaaagctaagtcacggttgaacaaccatggtttgtatatgcctttgcctgttcctacttccccttggattgatatttcgatggattttgttttgggattgcctagaactaagaaggggagggatagcatttttgtggttgttgatcgattctccaaaatggctcatttcataccttgtcataagactgatgatgctagcaatgttgctgaattgttttttagagagattattcgtttgcacggtattcccaatacaatagtctcggatcgtgatgctaagtttctgagtcatttttggagatctctgtggaataaattgggaactaaattgctgtttagcaccacttgtcaccctcagactgatggtcaaactgaggtagttaatcgaactttgtctaccatgcttagggctgttttagacaaaaatttgaaacgttgggaggattgcttgcctcatgttgagtttgcttataatcatgcaacccattcttctacaaagatgtgcccttttcaaattgtttatgttacattcctagggcgcctattgctttgttttcgcttgatgctgcggacgccccacacatagatgctcttgcacatgttgaacaaatgattaatctccatgaacaaactcaacaaaacattgctgctgctaatgctaaatatcagattactggtagtaaaggccggaaactagttacttttgaacctggtgatatggtttggttgcatttgagaaaggatcgttttcctactttgcgtcgttctaaattgatgcctcgtgctgctggtccttttaagatactaaccaagattaatgataatgcttataccctcgacctgcctgcggagtttggtgtttccactagttttaatgttgcagatttgaaaccgtatgcgggagaagacgaggagttgccgtcgaggacgacttcagttcaagaaggggaggatgatgaggacatcaacaccaacacgagcacatctacaccagcagcaccttctccagcccaggcaccatcttccccagtccaggcgccaccccttccacctgggccagtgacttgggcccgtgcaagagaattgaactacattatgctgttaaagaacgaaggcccggaagaatagacgaccagcccaactgcggcccataatggacgacctagggttggccgcccctaggggctgcgccccctctctatttatccaggagctgcgcctcctttattccttgagttttgttttacgttagccttagctactctcgaacacgcgcaaatctgcgctgtcttcgtgtattcagaactccaccctcgagtaatagattagattgctcgcatctttttcttgttcgttcttcgattgcgcacaggaaacgatcttcgtgatcaggccgatctcgcatcagcaaggtcggtaaccacagggagttggttcagcgattgcattggcgcctcgggcttgctcgtcgtagtcggatcgcaagggtcatcttccgccaaatcggaaatatctctactcgccgaaagatcgggcacctaagctacatcaatgttcgttgcgaaaaacgaagaaatggttccggtggcaaaaactcgtgcttgtatgcaccccgacacctgttttcggaatgggtgacgtgcggcaatgaaatcgcgcgaaaccaccccaaacatgtattttggacctaaagtagtggattgatgttcgttgcgaaaaacgaagaaacggtaccggtggcaaaaactcgtgctttgtatgcaccccgacacccgttttcggaatgagtgacgtgcggcaacaaaattgcgcgaaaccacgccaaacatgagttttggacctaaagtagtggattgggcatgttcgttgcgaaaaatgaagaaatggttccggtggcaaaaacttgtgcttgtatgcaccccgacacccgttttcggaatgggtgacgtgcggcaacgaaattgcgcgaaaccaccccaaacatgagttttggacctaaagtagtggattgggcatgttcgttgcgaaaaacgaagaaatggttccggtggcaaaaactcgtgcttgtatgcaccccgacacccgtattcggaatgggtgacgtgcggcaatgaaatcgcacgaaaccaccccaaacatgtgttttggacctaaggtagtggattgggcatgttcgttgcgaaaaacgaagaaatggttccggtggcaaaaactcgtgcttgtatgcaccccgacaccccgttttcggaatgggtgacgtgcggcaatgaaattgcgcgaaaccactccaaaaatgtgttttggacctaagtagtggattgggcatgttcgttgcgaaaaacgaagaaatggttccggtggcaaaaactcgtgcttgtatgcaccccgacacctgttttcggaatgggtgacgtgcgacaatgaaatcgcgcgaaaccacctcaaacatgtgttttggacctaaagtagtggattgggcatgttcgttgcgaaaaacgaagaaacggttccggtggcagaaattcgtgctttgtatgcaccccgacacccgttttcggaatgagtgacgtgcggcaacgaaattgcgcgaaaccaccccaaacatgagttttcaatctaaagtagtggattgggcatgttcgttgcgataaacgaagaaatggttccggtggcaaaaactcgtgcttgtatgcaccccgacacccgttttcggaattggtgacgtgcggcaataaaattgcgcgaaaccaccccaaacatttgttttggacctaaaatagtggattgggcatgtttgttgcgaaaaatgaagaaatggttctggtggcaaaaactcgtgcttgtatgcaccccgacacctgttttcggaatgggtgacgtgctgcaacgaaattgtgcgaaaccaccccaaacatgcgttttggacctaaagtagtggattgggcatgttcgttgggaaaaacgaaaatatggttccggtggcaaaaactcgtgctttgtatgcaccccgacacccgttttcggaatgagtgatgtgcggcaacgaaattgcgcgaaaccaccccaaaaatgagttttggacctaaaatagtggattgggcatgttcgttgcgaaaaacgaagaaatggttccggtggcaaaaactcgtgcttgtatgcaccccgacacccgtcttcggaatgggtgacgtgcggcaacaaaattgcgcgaaaccaccccaaacatgtgttttggacctaaagtagtggatttggcatgttcgttgtgaaaaaggaagaaatggttccggtggcaaaaactcgtgcttgtatgcaccccgacacccgttttcggaatgggtgacgtgcggcaacgaaattgcgcgaaactactcttaacatgtgttttggacctaaagtagtggattgggcatgttcgttgcgaaaaacaaagaaatggttccggtggcaaaaactcgtgcttgtatgcaccccgacacccgtttttggaatgggtgacgtgctgcaacgaaattgcgcgaaaccactcttaacatgtgttttggacctaaagtagtggattgggcatgtccgttgcaaaaaacgaagtaatggttccggtggcaaaaactcgtgctttgtatgcaccccgacacccgttttcggaatgggtgacgtgcggcaatgaaattgcgcgaaaccactccaaacatttcttttggacctgaagtagttgattgggcatgttcgttgcgaaaaacgaagaaatggttccggtggcaaaaactcgtgcttgtatgcaccccgacacctgttttcggaatgggtgacgtgcggcaatgaaatcgcgcgaaaccaccccaaacatgtattttggacctaaagtagtggattgatgttcgttgcgaaaaacgaagaaacggtaccggtggcaaaaactcgtgctttgtatgcaccccgacacccgttttcggaatgagtgacgtgcggcaacaaaattgcgcgaaaccaccccaaacatgagttttggacctaaagtagtggattgggcatgttcgttgcgaaaaacgaagaaatggttccggtggcaaaaacttgtgcttgtatgcaccccgacacccgttttcggaatgggtgacatgcggcaacgaaattgcgcgaaaccaccccaaacatgagttttggatctaaagtagtggattgggcatgttcgttgcgaaaaacgaagaaatggttccggtggcaaaaactcgtgcttgtatgcaccctgacacccgtattcggaatgggtgacgtgcggcaatgaaatcgcgcgaaaccaccccaaacatgtgttttggatctaaagtagtggattgggcatgttcgttgcgaaaaacgaagaaatggttccggtggcaaaaactcgtgcttgtatgcaacacgacacctgttttcagaatgggtgacgtgctgcaacgaaattgtgcgaaaccaccccaaacatgcgttttggacctaaagtagtggattgggcatgttcgttgggaaaaaacgaaaatattgttcctgtggcaaaaactcgcgctttgtatgcaccccgacacccgttttcggaatgagtgacgtgcggcaacgaaattgcgcgaaaccaccccaaacatgagttttggacctaaagtagtggattgggcatgttcgttgcgaaaaacgaagaaatggttccagtggcaaaaactcgtgcttgtatgcaccccgacacccgttttcggaatgggtgacgtgcggcaatgaaatcgcgcgaaaccaccccaaacatgtgttttggacctaaagtagtggattgggcatgtacgttgcgaaaaacgaagaaatggttccggtggcaaaaactcgtgcttgtatgcaccccgacacctgttttcggaattggtgacgtgcggcaataaaattgcgcgaaaccacccgaaacattggttttggacctaaaatagtggattgggcatgttcgttgcgaaaaacgaagaaatggttcctgtggcaaaaactcgtgctttgtatgcaccccgacacccgttttcggaatgggtgacgtgtggcaacgaaattgcgcgaaaccaccccaaacatgagttttggacctaaagtagaggattgggcatgttctttgcaaaaaacaaagaaatggttccggtgacaaaaactcgtgctttgtatgcaccccgacacccgttttcggaatgagtgacgtgcggcaacgaaattgcgcgaaaccaccccaaacattagttttggacctaaagtagtggattgggcatgttcgttgcgaaaaacgaagaaatgtttccggtcgcaaaaactcgtgcttgtatgcaccccgacacccgttttcgaaatgtgtgacgtgctgcaacgaaattgtgcgaaaccaccccaaacatgagttttggacctaaagtagtggattgggcatgttcgttgcgaaaaacgaagaaatggttccggtggcaaaaactcgtgcttgtatgcaccccgacacccgttttcggaatgggtgacgtgcggcaatgaaatcgcgcgaaaccaccccaaacatgtgttttggacctaaagtagtggattgggcatgtacgttgcgaaaaacgaagaaatggttccggtggcaaaaactcgtgcttgtacgcaccccgacacctgttttcggaattggtgacgtgcggcaataaaattgcgcgaaaccacccgaaacattggttttggacctaaaatagtggattgggcatgttcgttgcgaaaaacgaagaaatggttccggtggcaaaaactcgtgctttgtatacaccccgacacccgttttcggaatgggtgacgtgtggcaacgaaattgcgcgaaaccaccccaaacatgagttttggacctaaagtagtggattgggcatgttctttgcaaaaaacaaagaaatggttccgttggcaaaaactcgtgctttgtatgcaccccgacacccgttttcggaatgggtgacgtgcggcaacgaaattgcgcgaaaccaccccaaacatgagttttggacctaaagtagaggattgggcatgttcgttgcgaaaaacgaagaaatggttccggtggcaaaaactcgtgctttgtatgcaccgcgacacccgtttttggaatgagtgacgtgcggcaacgaaatggcgcgaaaccaccccaaacatgagttttggacctaaagtagtggattgggcatgttcgttgcgaaaaacgaagaaatggttccggtggcaaaaactcgtgcttgtatgcaccccgacacccgttttcggaatgggtgacgtgcggcaatgaaatcgcgcgaaaccaccccaaacatgtgttttggacctaaagtagtggattgggcatgttcgttgcgaaaaacgaagaaatggttccggtggcaaaaactcgtgcttgtatgcaccccgacacctgttttcggaattggttacgtgcggcaataaaattgcgcgaaaccacccgaaacattggttttggacctaaaataatggattgggcatgttcgttgcgaaaaacgaagaaatggttccggtggcaaaaactcgtgcttgtatgcaccccgacacccgttttcggaatgtgtgacgtgctgcaacgaaattgtgcgaaaccaccccaaacatgagttttggacctaaagtagtggattgggcatgttcgttgcgaaaaacgaagaaatggttccggtggcaaaaactcgtgcttgtatgcaccccgacacccgttttcggaatgggtgacgtgcggcaatgaaatcgcgcgaaaccaccccaaacatgtgttttggaccaaaagtagtggattgggcatgtacgttgcgaaaaacgaagaaatggttccggtggcaaaaactcgtgcttgtatgcaccccgacacctgttttcggaattggtgacgtgcggcaataaaattgcgcgaaaccacccgaaacattggttttggacctaaaatagtggattgggcatgttcgttgcgaaaaacgaagaaatggttcctgttgggggccttcggcttccgaaggtcctcaaaaacatgatttaacaatgtttctggagtataatgtgtgaacaggtatcttcggacttgtatcagaaagggagaagctcaaaagatacgaaggttgacacagtgccgaagatgtgaagcaggaaagcttcggcatgttcgcagaaaagggaaccgacttaaagatgaaaaggccatttggacctcgatagaatgctatagaattatcaccaaatgtaaagggcatgtatgtaattttgtgtgggttgtaccccgtgcctataaataggtgaacagtacccccgtactgttcacgctgatctggcatttgcttttgcgtcacacttgtattttcatctccttccaagccgaaggtacatttataattcgatattgtttctatttctttatgatgatataataaagttaaatgaatgatgttatatgattattcatgctatcttttatgtttcatatgcttcatttttcattaatgtatactgtgatgacgaaggttcgtccttcatggccttcgttcgaagatcgttatatcctaagggaaataatgcttcgaaggacgaaggactttatcgtttaacattctctgtgttgccttgttcttaactcatagcatttgagaacaagtccccaacattggcgcccaccgtggggtgaactcacttccatttcttgagctttttgacatcttcggcaagcatcaccttcgtcatgccgccgaagaaggcttcagcaccaggggctggcacgctgcagtcgctggaccccaatcaagacgtcctttctcttagagaggcacgaagccagaagaggaagactaccagtccaacacctccggaggatgatctagatcaggagattcaaaatctggaaatccttcagcagcaggttcaacgcaagaaggagaagatggccaggctagttgaattgcagaggcagatagatgaagcctctgaagaagttcgtcatcttgctcaggatgagcaacaccgaaggcctcagcatcaagaccttcatcaggagggctttcccaacgaagatgactggtatgacaatttccatcatgggaattttgtttttgatgatgcttctcccctgtccgctgagttacaggctacaccttggcctccgtcctacaagccgcctcagctccccgtatttgatggccactcagacccgaagcagtttttgatgagctacgaagcaacagtgtcttcgtatggtggcaatgcttcagtcatggccaaatctttcgttatggctgtcagaagtgttgctcaaacctggtattcttcccttcgaccaggaacgatcacttcatggcagaagctgaaggatttgttgttaaccagctttcaaggatttcagacgaagccggtcactgctcaggctctgttccagtgcactcaggaccacgaagaataccttcaggcatatgtccgaaggttcttgcgtctgagggcacaggcaccaacggtgcccaatgaaattgtcatcgaggccatgatcaaggggcttcggccaggtccgtcagctcagtatttcgccaggaagcctcctcaaactttggagaagcttctccagaaaatggatgaatacattcgggccgacaatgattttcgccaaagaagggaggaggctttcaggttttctgaaatgaccaggggcttcggaggaagattttacccgaggcatgtgagatcaattcacaattccacacaaaatgatgacagaggaagccaacagcaaaggccacaatgctcctcacaggcttctggtcaacagcaaagctcattccggccaccagctccaagaggcagaggcgccaggggcttcggaggaagatttgttgatcaaccgagaagaatcttttgcttattctgcggtgagaacaaaggccatactaccaggatgtgccatgttactatacagaagcaaaaggaaatagctgaagcagcagcacaacaagcccagccgaagcaggttatgcatacagcttcgtatcattcgccctacatcccagaatatgtgggcatcaaggtaaaagataccgtcgacctcgcaccctgtgtaatttga

SEQ ID NO: 395 - DNA, 18053 bp, Zea mays
  source (0)...(0): Zea mays BAC clone full insert sequence contig Ch4 bacm.pk184.c21.fis22
ggcaccgatcctcttattccacggttgcagacttgttggttgctgacccctcctgttgtgcaaggtaagaattggtaagagcttgtgtggcaggttgagagtgagcgccttgcagtagctacatcctaatagttgtagagtttttattccttcacgttttttttttcttgttgcctctgttcgtctaaccatggcaggattggaggttgatgatgcttctcgtaatatgccacactctcctcgcaccaagggtatcatacaacactttgtaaggctagtgaagacgcacacggaaggtcttgataatgacatgcaggtgacgaatgaaaagatggggcaattggaggccacacagatcgacacaaacaccaaacttgcaaatgtggaaatgacagttgctcatattgacaagagccttgtcgcactcttgaggcggtttgatgagatgcatgctaatatcaatggtgggcgtgatgagggcgccgaaggtaactgggatgactatgttgctgatactgaacaagatgaccaagaagcacctaatcgccggcgactacgtactaaccgtagaggtatgggtggttttcaccgacgtgaggtacatggtaatgatgatgcttttagtaaggttaaatttaaaatacctccttttgatggtaaatatgaccctgatgcttacattacttgggagattgcggttgatcaaaagtttgcatgccatgaatttcctgagaatgcgcgggttagagctgctactagtgagtttactgaatttgcttctgtttggtggatagaacatggtaagaagaatcctaataacatgccacaaacttgggatgcgttgaaacgggtcatgcgggctagatttgttccttcttattatgcacgtgatatgttaaacaagttgcaacaattgagacagggtactaaaagtgtagaagaatattatcaggaattacaaatgggtatgctgcgttgtaacatagaggagggtgaggaatctgctatggctagatttttgggcgggttaaatagggaaattcaggacatccttgcttataaagattatgctaatgtaacccgattatttcatcttgcttgcaaagctgaaagggaagtgcagggacgacgtgctagtgcaaggtctaatgtttctgcaggaaaatctacaccatggcaacagcgcacgactacgtccatgaccggccgtacaccagctccaactcccttgccaagtcgaccagcacccccgccttcctccggcgacaaaccacgtgcaccttccacaaattcagcaaccaaatctgcccagaaaccagcaggtagtgcctcttcagtagcctccacgggtagaacaagagatgttctgtgttatcgatgcaagggctatggacacgtgcagcgtgattgtcctaatcagcgtgttttggtggtaaaagacgatggtgggtattcctctgctagtgatttggatgaagctacacttgctttgcttgcggctgatgatgtaggcactaaggaaccacccgaagaacagattggtgcagatgatgcagagcattatgagagcctcattgtacagcgtgtgcttagtgcacaaatggagaaggcagagcagaatcagcgacatacgttgtttcaaacaaagtgtgtcattaaggagcgttcatgtcgtttgatcattgatggaggtagctgcaacaacttggctagcagcgacatggtggagaagcttgcacttacgaccaaaccgcacccgcatccatatcacattcaatggctcaacaatagtggtaaggtcaaggtaaccaagctggtacgaattaattttgctattggttcatatcgtgatgttgttgactgtgatgttgtgcctatggatgcttgtaatattctgctaggtagaccatggcaatttgattcagattgtatgcatcatggtagatcaaatcaatattctctcatataccatgataagaaaattattttgcttcccatgtcccctgaggctattgtgcgtgatgatgttgctaaagctaccaaagctaaaactgagaacaacaagaatattaaagttgttggtaataacaaagatgggataaaattgaaaggacattgcttgcttgcaacaaaaactgatgttaatgaattatttgcttccactactgttgcctacgccttggtatgcaaggatgctttgatttcaattcaagatatgcagcattctttgcctcctgttattactaacattttgcaggagtattctgatgtatttccaagtgagataccagaggggctgccacctatacgagggattgagcaccaaattgatcttattcctggtgcatctttgccgaatcgtgcgccatataggacaaatccagaggaaacaaaagaaattcagcgacaagtgcaagaactactcgacaaaggttacgtgcgtgagtctcttagtccgtgtgctgttccggttattttagtgcctaaaaaagatggaacatggcgtatgtgtgttgattgtagggctattaataatatcacgatacgttatcgacaccctattccacgtttagatgatatgcttgatgaattgagtggtgccattgtcttttctaaagttgatttgcgtagtgagtaccaccagattcgtatgaaattgggagatgaatggaaaactgctttcaaaactaagttcggattgtatgagtggttagtcatgccttttgggttaactaatgcacctagcactttcatgagattaatgaacgaggttttgcgtgccttcattggaaaatttgtggtagtatactttgatgacatattaatctacagcaaatctatggatgaacatgttgatcacatgcgtgctgtttttaatgctttacgagatgcacgtttatttggtaaccttgagaagtgcacattttgcaccgatcgagtttcgtttcttggttatgttgtgactccacagggaattgaggttgatcaagccaaggtagaagcgatacatggatggcctatgccaaagactatcacacaggtgcggagtttcctaggacttgctggcttctatcgccgttttgtgaaggactttagcaccattgctgcacctttgaatgagcttacgaagaagggagtgcattttagttggggcaaagtacaagagcacgctttcaacgtgctgaaagataagttgacacatgcacctctcctccaacttcctgattttaataagacttttgagcttgaatgtgatgctagtggaattggattgggtggtgttttgttacaagaaggcaaacctgttgcatattttagtgaaaaattgagtgggtctgttctaaattattctacttatgataaggaattatatgctcttgtgcgaacattagaaacatggcagcattatttgtggcccaaagagtttgttattcattctgatcatgaatctttgaaacatattcgtagtcaaggaaaactgaaccgtagacatgctaagtgggttgaatttatcgaatcgtttccttatgttattaagcacaagaaaggaaaagagaatatcattgctgacgctttgtctaggagatatactttgctgaatcaacttgactacaaaatctttggattagagacgattaaagaccaatatgttcatgatgctgattttaaagatgtgttgctgcattgtaaagatgggaaaggatggaacaaatatatcgttagtgatgggtttgtgtttagagctaacaagctatgcattccagctagctccgttcgtttgttgttgttacaggaagcacatggaggtggcttaatgggacattttggagcaaagaaaacggaggacatacttgctggtcatttcttttggcccaagatgagaagagatgtggtgagattggttgctcgttgcacgacatgccaaaaggcgaagtcacggttaaatccacacggtttgtatttgcctctacccgttcctagtgctccttgggaagatatttctatggattttgtgctgggattgcctaggactaggaagggacgtgatagtgtgtttgtggttgttgatagattttctaagatggcacatttcataccatgtcataaaactgacgatgctactcatattgctgatttgttctttcgtgaaattgttcgcttgcatggtgtgcccaacacaatcgtttctgatcgtgatgctaaatttcttagtcatttttggaggactttgtgggcaaaattggggactaagcttttattttctactacatgtcatcctcaaactgatggtcaaactgaagttgtgaatagaactttgtctactatgttaagggcagttctaaagaagaatattaagatgtgggaggactgtttgcctcatattgaatttgcttataatcgatcattgcattctactacaaagatgtgcccatttcagattgtatatggtttgttacctcgtgctcctattgatttaatgcctttgccatcttctgaaaaactaaattttgatgctactaggcgtgctgaattgatgttaaaactgcacgaaactactaaagaaaacatagagcgtatgaatgctagatataagtttgctagtgataaaggtagaaaggaaataaattttgaacctggagatttagtttggttgcatttgagaaaggaaaggtttcctgaattacgaaaatctaaattgttgcctcgagccgatggaccgtttaaagtgctagagaaaattaacgacaatgcatataggctagatctgcctgcagactttggggttagccccacatttaacattgcagatttaaagccctacttgggagaggaagttgagcttgagtcgaggacgactcaaatgcaagaaggggagaatgatgaagacatccacactactgatgcatctataccaatacaagtaccaatttctggtcccattactcgcgctcgtgctcgtcaactcaaccatcaggtgattacactcttgagttcatgtccatcatatttagaccatggagacccgtgcactcttgttttgcttaggaatcagggagaagaccgaaagggaaaaggatttgaacatgctggattcggactgcagaagaacaccaacttgtgacggtcaccacggtcagatgcgggctcggattggaatgttcaagcacaacatggaaagcttatcaagtctactttcatatggatccggaattatagtcatatctgttctgaggccgccgtaatcattgttttcttaccgagacatttcctgccttttctgcccatggtgctgcgtcaccctattttggcccaatgggtcgtgtatcaagttaggtccattagggacgcatcctagggttgcagcacgaccccaatacccttgtggtcgtcctcccatgtttataaaccccctagccgccaccaagaacggcgggttttgtttagatcaagtttagctctcgctacttgcttgtaagcgcgcgtgctagtcagccgcccgtcttcttgtcttcggaaccccaccatattgtagtttgatctttaaacctacatttagatctggtaattcagtacttgttctacttgttcttgctagttcttcgattgcttgcaggacgagtgccctagtggccagggtgtcacgctccacaagatcgtgacagccataggaggtggtgtatcggttgctaaggcgcagcgtctttggaaggctgtagtcgggccgtgaacgtcgtctcctcccccaatcgagttattccacaccctctcatcgaaagatcgggcaatcacccaacgggtgcacatcataaccgctacgcaaatcaaccttagagaaaataacggcaccactaagctcatctaacatatcatcaaggcgtggaataggatatcgataacgaactgtgatgttattaatagcacgacaatctacgcacatacaccatgacccatcttactttggaacgagtaaaacaggaaccgagcaagggctaagagactcacgaatgtaatccttatcaagcagcgtctgcacctggtgctggatctccttcgtctcctctggatttgtacggtacggggcgcggttcggaagagaagcgccggggatgagatcgatctgatgctcaatgccacggaggggaggaagacccggtggtaagtccgtaggataaacatcagcatactcctgcaaaaggttaacaacagcagggggtatatccaaagacggtgcatcatcaagcggaacaagcatgcgcgagcatacaagtgcataacagggcatatgagcttcatggagatcatcaaaatcagcacgtgtagcaagtaaaacaggagagtgcaacttgatttcagatttaataggtgcggctgatgtcgatttgacttgttgtgcagttttagcagccctagtaagatcatctttcaaaatttggtcaggggtcattggatgtataattattttctggcctttaaacatgaaagaataatgatttgaacaaccatgatgtaaactatcagtatcatattgccaaggtcgacccaataacaaagagcatgcttccataggaataacatcgcaatcagcataatcagaataagaacccagcaaaaaggggacacgtaccgaacgtgttacctttattttaccaccatcattaagccattgaatgtgatacggatgtggatgtgtgcgagtgggcaaggataatttctctaccaacgctgtacttgccatattgttgcagctgccactattgatgatgatgcgaatcgaccgttcgtgcacgacgcccttggtatggaatagagtgtgtcgctgattttgttcggcctgggcaacctgtgtgctgagaacacgctgcacaacaagactctcatacctattggcgttgatgggatcaacgtggacttcctcattttctgcatggttagtggcaatcatagcatgactagtttcctcagaatcactggctgaagagtactcaccattgtcacgtataagcaaggtacgcttgtttgggcagtcccgaatcatatgcccaaaccctctgcaacgatggcactaaatatcccgtgtacgtcctgtggaagaagcgacgcctttggcagggggcgccactggcttggtcgtccctgtgcgcgatgtagtgctaggcgtagaaggtgcagggctggaaggagttgagctgtgtgttggaccccggcctgcaatagagttagtatatgtctttgatcgtcgtccctgcacttcacgttcagctttgcaagcatattcaaacaatgtggttatatcaaaataatccttataatcaagtatatcctgaatttccctgttcaaaccaccacgaaaacacgccatagcagcgtcatccgactcaaccaaaccacaccgaagcatacccttttgtaactcctggtaatattcctcaacagactgtgaaccttgttgaaaatactgcattttgttaagcaaatcacgagcataataggaaggaacaaatctgtggcgcatggcagtttttaattgggtccaagtaatgacactgttaatgggaagtttttgtttatactcacgccaccaaattaaagcaaaatcagtaaattcactaatggcagccttcacttggctattagcaggaatatcatggcatgaaaatttttgttctacctctaattcccaatcaagatatgcagcgggatcatatttaccattaaaagatggaattttaaatttaatcttagaaaataagtcattagggggatgacgaaccacacgacgtgcacgaccacggcgatctccatcatcctgctcagtgtcaccgtcgtattcctgctccatctttatggccaatgcatcaaggcgtgccaggatggtgtcgagtgtggtgcgagtcgccgtttgagcaaggtcaagttggttgaaacgctcggtcgtcgaagtgatcgttgaatcaagccgttcatgcatcgtcctaatgtcagcagcaagtccatcaacttgctcccttacttcctgcaactgggcatccaccatgtcgtgtgctcttgccatagttagcgcaaacaccaaaacaccaaaaggagaaaaaaaaaccagcgacaaaaacaggggtgtactgctcacaaggcgctcacactagtgctgttatcaagttcttatccgttcttaccaagccacagtggtgaactgcaaccaacaggtggaaccggtgaaagattggatgagcgattgcctggagaaacagaaaccttctcgtcgtagaaatatgtggagttttgggtaggctgcactcaagtcaatgattagcacaatcaaacaataatgcaaagttgaattatagtgcagaacacgaaactatattgctggccacaagtgcaaaggacgaatggaactagcagaatggcagtaccgtaaatattatactagtgaggccactagtaggaatcacaagtgattttgtttttcttttttgtatgatttttttgatatttttctcagcacaagaagcaacaaaataggagctatacaaagtttcacctaaaacagagttcagatgtggtctacagaaaatcaggaagttctctgaaaagcgtgcgagaactttgatggattttttctttattttcctgaattgttttgacaattttgtcgaaaccaaatagactgaaggtgagtttggccggcctcagaatggtgtcaacaagctcctgtaaaaatttcagattttttggacacccgagcgaaaagttatgcccgttttacggcaggtacctcaatttatgctttaaaacgaccgggatgaaacaaccgtatcctttctccttcgttttcttttttttatttctgttttttttacgtaaccgaaggagaaaaacaaggaagcggccgttgactcggtttgtttttttttcgtatccgaaggagaaaaacaaggaaacgaccgttgactcggtttgtttttttctgttttttttttgacgtaaccgaaggagaaaaacaaggaaacgatgttgactcggtttgtggcgtgatcaaacgggagatggtggcggcgctagggtttgaatggtggaagaacacaatgcaaccagcaacaaatgacgcgaaagcacacaaattcaacaatgcagattattgaaagaaagtgcgagactcaaaagggtgctgggataaggtctaacctgaatttttatgtggttttgtggactgtaggaaaaaaacactcgataaactcaccgatcaacctggaaatctgataccaattgatgtagctgaggtgcccgatctttcggtgagaggagataattccgatttggcggaagatgacccttgcgatccgactacgacgagcaagcccgaggcgccaatgcaatcgctgaaccaactccctgtggttaccgaccatgctgatgcgagatcggcctgatcacgaagatcgtttcctgtgcgcaatcgaagaacgaacaagaaaaagatgcgagcaatctaatctattactcgagggtggagttctgaatacacgaagacagcgcagatttgcgcgtgttcgagagtagctaaggctaacgtaaaacaaaactcgaagaataaaggaggcgcagctcctgtttaaatagagagggggcgcagcccctaggggcggccaaccctaggtcgtccactatgggccgcagttgggctggtcatctattcttctgggccctcattcttcagtagcatgacgaagttaagatctctggcacgggcccgagtgattggcccagctaatgaaggaagtggcgcttgatgttgaggtgctgctggtgtggtcgtactcatagtgatgtcctcatcacaatcctctactttaggtccaaaactcatgtttggggtggtttcgcgcaatttcgttgccgcacgtcactcattccgaaaacgggtgtcggggtgcatacaaagcacgagtttttgccaccggaaccatttctttgtttttcgcaacgaacatgccgaatccactactttaggtccaaaactcatgtttggggtggtttcacgcgatttcattgccgcacgtcacccattccgaaaacgggtgacagggtgcatacaagcacgagtttttgccaccggaaccatttcttcgtttttcgcaacgaacatgccctccactactttaggtccaaaactcatgtttggggtggtttcgcgcaatttcattgccgcacgtcacccattccaaaaacgggagtcgaggtgcatacaaagcacgagtttttgccaccggaaccatttcttcgttttttgcaacgaacatgcccaaaccactactttaggtccaaaactcatgtttggggtggtttcgcgcaatttcgttgccgcacgtcactcattcagaaaacgggtgtcggggtgcatacaaagcacgagtttttgccaccggaaccatttcttcgttttcccatcgaacatgcgcaatccactactttaggtccaaaacacatgtttggggtcatttcacacaatttcgttgccgcacgtcacccattccgaaaacgggtgtcggggtgcatagaagcacgagtttttgccacgggaaccatttcttcgtttttcgcaacgaacatgcccaatccactactttaggtccaaaacacatgtttggagtggtttcgtgcaatttcattgccgcacgtcacccgttccgaaaacgggtgtcggggtgcatacaaagcacgagtttttgccaccggaaccatttctttgtttttcacaacgaacatgcccaatccactactttagatccaaaacacatgtttggggtggtttcacgcaatttcgttgccgcacgtcacccattccgaagacgggtgtcgggggtgcatacaagcacgagtttttgccaccggaaccatttcttcgtttttcgcaatgaacatgcccaatccactactttaggtccaaaactcatgtttggggtggtttcgcgcaatttcgttgccgcacgtcactcattccgaaaacgggtgtcggggtgcatacaaagcacgagtttttgccaccggaaccatattttcgtttttttcccaacgaacatgcccaatccactactttaggtccaaaacgcttgtttggggtggtttcacacaatttcgttgcagcacgtcacccattctgaaaacaggtgtcggggtgcatacaagcaccagtttttgccaccggaaccatttcttcgtttttcgcaacgaacatgccgaatccactattttaggtccaaaacacatgtttgggttggtttcgcgcaattttattgccgcacgtaaccaattccgaaaacgggtgtcgggttgcatacaagcacgagtttttgccaccggaaccatttcttcgtttttcgcaacgaacatgcccaatccactactttaggttcaaaacacatgtttggggtagtttcgcgcgatttcattcccgcacgtcacccattccgaaaacgggtgtcggggtgcatacaagcacgagtttttgccaccggaaccatttcttcgtttttcgcaacgaacatgcccaatccactactttaggtccaaaactcatgtttgcggtggtttcgcgcaatttcattgccgcacgtcacccattccgaaaacgggtgtcgggtgcatacaagcacgagtttttgccaccggaaccatttcttcgtttttcgcaacgaacatgcccattccactactttaggtccaaaactcatgtttggggtggtttcgcgcaatttcgttgccgcacgtcactcattccgaaaacgggtgtcgggggtgcatacaagcacgagtttttgccaccggaaccatttctttgtttttcccaaggaacatgcccaatccactactttaggtccaaaactcatgtttggggtggtttcgcgcaatttcgttgccgcacgtcactcattcagaaaacgggtgtcggggtgcatacaaagcacgagtttttgccaccggaaccatttcttcgtttttcgcaacgaacatgccgaatccactactttaggtccaaaacacatgtttggggtggtttcgcacaattttattgcagcggtttcgcgcgatttcattgtcgcacgtcacccattccgaaaacgggtgtcggggtgcatacaagcacgagtttttgccaccggaaccatttcttcgtttttcgcaacgaacataaccaatccactactttaggtccaaaacttatgtttgcggtggtttcgcgcaatttcattgccgcacggtcacccattccgaaaacgggtgtcggggtgcatccaaagcacgagttccttgccacaggaacaatattttcgtttttcgcaacgaacatgcccaatcctctactttaggtccaaaactcatgtttggggtggtttcgcgcaatttcgttgccacacgtcacccattccgaaaacgggtgtcggggtgcatacaaagcacgagtttttgccaacggaaccatttcttcgttttttgcaacgaacatgcccaatccactacttcaggtccaaaactcatgtttggggtggtttcgcgcaatttcgttgccacacgtcacccattccgaaaacgggtgtcggggtgcatacaaagcacgagtttttgccaacggaaccatttcttcgttttttgcaaagaacatgcccaatccactactttaggtccaaaactcatgtttggggtggtttcgcgcaatttcgttgccacacgtcacccattccgaaaacgggtgtcggggtgcatacaaagcacgagtttttgtcaccggaaccatttcttcgtttttcgcaacgagacaagtggtgcagcgagcaacaaatcgctccacgtctcttctcatctttggccaaaagaaatggctcgctaatatgtcttctgtcttcttcacaccaaaatgtcccatcaacccacctccatgtgcttcctgtaataataatatacgcacagaacaagctggaatgcataatttgttagcccgaaacacaaagccatcggtgagaacaaatttgttccatgtccttccttctttacattgtaaaagcacatctttgaaatcagcatcgaaagcatattgttgtttaattgtctccaagccaaaaatcttaaaatctagttgggacaacatggtgtaccgacgagacaaagcatccgcaatgacattatcttttcctttcttatgtttgatcacatagggaaaagattcaataaattcgacccacttggcatgcctacggttcagatttgtttgtctccttagatgtttcaaagattcatgatcagaatgtataacaaattctttaggccataagtagtgttgccatgtttccaaagttcgaactaaagcatataattctttatcataagtggaatagttcaaactaggaccattcagtttctcactaaaataagcaacaggcttcccttcttgcaacaagacaccacccaaaccaataccgctagcatcacattccaattcaaaagtcttattaaaatcaggtaattggagaaggggtgtatgagttaacctatccttcaaagtctcaaatgcatcctcttgcgccttaccccaagaaaatgtagcacccttcttcgtaagctcgtgcagcggccctgcgatggtgctgaaatctttcacaaatcgacgatagaacccagcaagcccgagaaagcttcggacttgcgtgaccgtggtagggactggccagctatgtattgcctccaccttagcctgatcaacttcaattccctgtggtgtcacaacatagccaagaaaagagacacggtctgtgcaaaatgtgcacttatcaaggttaccaaataagtgtgcttcacgtaaagcattaaaaacagcacgtagatgattaagatgatctactagacatttgctatagatcaagatgtcatcaaagtagacaaccacaaatcttccaatgaaagcacgtaaaacctcattcattaatctcatgaaagtactaggtgcattagtaagaccaaaaggcatgactaaccactcgtacaaaccaaacttggttttaaatgctgttttccattcatctcctagcttcatgcgaatttggtgatatccactacgtaagtcaatcttagagaaaaccatcgagccactaagttcatccagcatatcatctaacctagggataggatgacgatacctgatggtaatgttattaattgctcgacaatctacacacatgcgccatgagccatctttctttgggactagtaaaacagggacagagcaaggactaagggactcacgcacataacctttatcgagcaattcttgtacttatcgctgaatctccttggtttcttctgggttcgtcctgtatggcgctcggtttggcaaggaagcccctgggatgaggtcaatctgatgtccaattcctcttatcggtggcagcccaggtggcacttcttttggaaatacatcagcatagtcctgcaaaagattagtgatagtagaaggcaaagtagatggtatgttgtgaagtgagaacaaagcatccttgcatataaacacatagcagattgcatcaacatcgtttaattcaagtaaatcagatttggaagcaaggaaacaagcacttttcagttgtatttcatttttccttacatgagcagatttagaattatcactcttaggttgtaccaattcctttgtaacatctagattgttattatgaacagatttgtttttctctttgcatgctctagcaacttcatctttcaagatagcatcgggggacatagggtgcaaaacaagcttcttctcattatgcataaaagagtattgatttgttttaccatgatgcacggtgtccttatcaaattgccatggtctaccaaataacatagagcaagcttgcatgggtaccacatcacaatcaatataatcatggtatgaaccaattgtaaattccacacggaccatacgtgttaccttaagcttaccactatcgttgaaccattggatgtagtaggggtgtggatgtggaagcgttttcagcccaagcctctctaccatggtggtgcttgctaagttgttacagcttcctccatcaattataatacgacaagatcgttccaaaactacacatttagtttggaacaggttgtgtcgctggttttgttcagctttaataatttgggcactcaagacacgtcttacaaccaggctctcatagtgttctgcatatgatgctgatttcaaagatgtgttgctgcattgtaaagatgggaaaggatggaacaaatatatcgttagtgatgggtttgtgtttagagctaacaagctatgcattccagctagctccgttcgtttgttgttgttacaggaagcacatggaggtggcttaatgggacattttggagcaaagaaaacggaggacatacttgctggtcatttcttttggccccagatgagaagagatgtggtgagattggttgctcgttgcacgacatgtcaaaaggcgaagtcacggttaaatccacacggtttgtatttgcctctacccgttcctagtggtccttgggaagatatttctatggattttgtgctgggattgcctaggactaggaagggacgtgatagtgtgtttgtggttgttgatagattttctaagatggcacatttcataccatgtcataaaactgacgatgctactcatattgctgatttgttctttcgtgaaattgttcgcttgcatggtgtaccaacacaatcgtttctgatcgtgatgctaaatttcttagtcatttttggaggactttgtgggcaaaattggggactaagcttttattttctactacatgtcatcctcaaactgatggtcaaactgaagttgtgaatagaactttgtcaactatgttaagggcggttctaaagaagaatattaagatgttggaggactgtttgcctcatgttgcatttgcttataatcgatcattgcattctactacaaagatttgcccatttcagattgtatatggtttgttgccccgtgctcctattgatttaatgcctttgccatcttctgaaaaactaaattttgatgctactaggcgtgctgaattgatgttaaaactgcatgaaactactaaagaaaacatagagcgtatgaatgctagatataagtttgctagtgataaaggtagaaaggaaataaattttgaacctggagatttagtttggttgcatttgagaaaggaaaggtttcctgaattgcgaaaatctaaattgttgcctcgagccgatggaccatttaaagtgctagagaaaattaacgacaatgcatataggctagatctgcctccagactttggggttagccccacatttaacattgcagatttaaagccctacttgggagaggacgttgagcttgagtcgaggatgactcaaatgcaagaaggggagaatgatgaagacatccacactactgatacatctatgccaatacaagtaccaatttctggtcccattacttctggtcccattactcgcgctcgtgctcgtcaactcaaccatcaggtgattacactcttgagtgcatttccatcatatttagaccatggagacccgtgcactcttattttgcttaggaaccagggagaagaccgaaagggaaaaggatttgaacatgctggattcgaactgcagaagaacaccaacttgtgacggtcaccacggtcacatgcgggctcggattggaatgttcaagcacaacatgatgtagctgaggtgcccgatctttcggcgagtagagataattccgatttggcggaagatgacccttgcgatccgactacgacgagcaagcctgaggcgccaatgcaatcgctgaaccaactccctgtggttaccgaccttgctgatgcgagatcggcctgatcacgaagatcgtttcctgtgtgatgtagctgaggtgcccgatctttcggcgagtagagataattccgatttggcggaagatgacccttgcgatccgactacgacgagcaagcccgaggcgccaatgcaatcgctgaaccaactccctgtggttaccgaccttgctgatgcgagatcggcctgatcacgaagatcgtttcctgtgcgcaatcgaagaacgaacaagaacaagatgcgagcaatctaatctattactcgagggtggagttctgaatacacgaagacagcgcagatttgcgcgtgttcgagagtagctaaggctaacgtaaaacaaaactcaggaaataaaggaggcgcagctcctgaataaatagagagggggcgcagcccctaggggcggccaaccctaggtcgtccattatgggccgcaattgggctggtcgtctattcttccgggccttcgttctttaacaacatgatgtagttcaattctcttgcacgggcccgagtcactggcccaggtggaaggggtcgcgcctgggctggagaaggtgctgctggtgtagatgtgctcgtgttggtgttgatgtccgcatcatcctccccttcttgaactgaagtcgtcctcgacggcaactcctcattttctcccgcatacggtttcaaatctgcaacattaaaactagtggaaacaccaaactccgcaggtaggtcgagggtataagcattatcattaatcttggttagtatcttaaaaggaccagcagcacgaggcatcaatttagaacggcgcaaagtaggaaaacgatcctttctcaaatgcaaccaaaccatatcaccaggttcaaaagtaacatgttttcttcctttactaccagcaacctgattttttgtattagtagcagcaatgttctgtttcgtttgttcatggatggtaatcatttgttcaacatgtgcagaagcatctacatgtggggcgttcgcagcattaagtgaaatcaaatcaataggtgccctaggaatgtaaccataaacaatctggaaagggcacatctttgtagaagaatgcgtggcatgattgtaagcaaattcaacatgaggcaagcaatcctcccaacgtctcaaa

SEQ ID NO: 396 - DNA, 28049 bp, Zea mays
  source (0)...(0): Zea mays BAC clone full insert sequence contig Ch4 bacm.pk184.c21.fis23
ccgaagggcccttgttgcaactgccactgtcgataatgatgcgaatcgaccgctcctgcacaacaccctttgtatggaacagagtgtgtcgctgattcttctcgggcaaagcgacctgtgtactgagaacacgctgcacaacaagactttcatacctatcagcgtcgctcgggttgacatgtacctccgccttagctgcatggtcagtggcaagtagtgcatgttcaatttcttcagaatcactagcggaagagtactcaccatcgtcacgaatgagcaaagtgcgcttgtttgggcagtcccgaatcacatggccaaatcctctacaacgatgacactgaatatcccgtgtacgacctgtgggtggggcagtgctggctggattggtcgtcttctcgcgtggagtagtggtggacgtggatggcgcagggggaactggtgctgaggtggatgtcgagcttcgtcctgcaaaagggttagaatatggcttcgagcggcgtccctgcacttcacgttcagctttacaagcatattcaaataaagtagtcatatcataatattccttataatcaagtatatcttggatttcgcggtttaaaccaccacgaaaacgtgccatagcagcgtcgttgtcctctaatatcccacaacgaatcatacctttttgtaactcctggaaatagtcctcaacagattgagaaccttgctgaaaacgctgcattttattaagcaaatcacgagcataatacgaaggcacaaatcgatgtcgcatcgcagctttcaactgatcccaagtggttggaatggtagtgggatgttttattttaaactcacgccaccaaattaaagcaaaatcagtaaattcactaatagcagctttaacctgagaatgtgcagcaatatcatggcatgaaaatttttgttcaacctctaactcccaatcaagatatgcagcaggatcatatttgccattaaaaggtggaattttaaatttaatcttagaaaataagtcattagggggatgacgaaccacacggcgtgcacgaccacggcgatctccatcttcccactcagtgtcaccgccgtagtcctgctccatctttgtggtcaacgcatcaaggcgtgccaggatggtgtcgagtgtggtgcgagtcgctgtttgagcaaggtcaagctggttgaaacgctcggtcgtcgaagtgaccgttgaatcaagccgttcatgcattgtcataatgtcatcagcaagtccatcaacttgtccccttacttccagcaactgggcatttaccgtgtcgtgtgctcctgccatagttagcgcaaacaccaaaacaccaaaagaagaagaaaaaaacaacgacaaaaacaggggtgtactgctcacaaggcgctcacactagtgctgttatcaagttcttattcattcttaccaagccacagtggtgaactgcaaccaacaggtggaaacggtgaaagattggatgagtgattgcctggagaaacagaagcctgctcgtcgtagaaatatgtggagttctgggtaggctgcactcaagtcaatgattagcacaatcaaacaataatgcaaagttgaattatagtgcagaacacgaaactatattgctggccacaagtgcaaaggacggatggaactagcagaatggcagtaccgtaaatattgtactagcgaggccactagtaggaatcacaagtgattttgtttttcttttttgtatgatttttttgatatttttctcagcacaagaagcaacaaaataggagctagacgaagtttcaccgaaaacagagatcagatgtggtctacagaaaatcaggaagttctctgaaaagcgtgcgagaactttgacggatttttttctttattttcctgaatttttttgacaatttcgtcgaaaccaaacagaccgaaaggtcagtttggccggcctcagaatggtgtcaactagctcctgtaaaaatttcagattttttggacacccaagcgaaaagttatgcccggtttaaggaaggtacctcaaattatgttttcaaacgaccgggatgaaacaaccgtatcctttctccttcgttgttttttgtttctgttttattttttgacgtaaccgaaggagaaaaacaaggaaacgatgttgactcggtttgtttttttttctgttttttttcgtaaccgaaggagaaaaacaaggaaacggccgttgactcggtttgtttttttctgtttttttttacgtaaccgaaggagaaaaacaaggaaacgatgttgacttagtttgtggcgtgatcaaaggggagatggtggcggcgctagggtttgaatggtggaagaacacaatgcaaccagcaacaaatgacgcgaaagcacacaaattcaacaatgcagattattgaaagaaagtgcgaggctcaaaaggtgctgggataagatctaacctgaatttttatgtggttttgtggactgtaggaaaaaaacgctcgataaactcaccgatcaacctggaaatctgtcggggaccataattaggggtaccctcaagacgcctaattctcagctggtaacccccatcagcataaagctgcaaaggcctgatgggtacgattaagtcagggatcagtccacacgagtgacttgatcacgcttcgctcgtgcctagcctcggccaagggcagccgacctcgagagacttccgtctcgcccgaggcccccctttttaacggcggacgcacctccggctcgcccgaggccttggcttcgcctagaagcaaccctgactaaatcgccgcgccgactgaccaggttgcaggagcatttaacgcaaaggtggcctgacacctttatcctgacacgcgccccccagcagagccgaagtgaccgccgtcactccaccgctccactgaccagtctgacagaagaacagcgccgcctgtgccacaccgactacagtgccactcgacagagtgagtctgacaggcagtcaggccctgccgaaggcgccatgggaaactccgctccgcctgaccccagggctcggactcgggctaagacccggaagacggcgaactccgctccgcccgaccccagggctcggactcgggctaagacccggaagacgacgaactccgctccgcccgaccccagggctcggactcgggctaagacccggaagatggcgaactccgctccgcccgaccccagggctcggactcgggctaagacccggaagacggcgaactccgctccgcccgaccccagggctcggactcgggctaagacccggaagacgacgaaactccgcctcgcccgaccccagggctcggactcgggctaagacccggaagacgacgaaactccgcctcgcccgaccccagggctcggactccgccctggcctcggccaaacgatctccgcctcgcccgaccccagggctcgggctcggcctcggcaacggaagacagactcgacctcggcttcggaggagcccccacgtcgccctgcctagggcacaggcccgccacgtcaacaggaagcgccatcatcgtcctaccccgaatcgactcgggtcacggagaacaagaccggcgtcccatccggccagctccgccggatgggcaatgatggcgctccacgagctctgtgacgacggcggccctcagctctcttacggaagcagggcgacgtcaacaaggacccgaccgctccaacagctgtccctccgccaggctccgtcgctcctccgacagccacgacatcacgccagcaaggtgccaagacctctccggctgccacattggcatgtacctagggcgctagctctctctccgctagacacgtagcactctgctacaccccccattgtacacctggatcctctccttacgattataaaagggaggaccagggccttcttagaggaggttggtcgcgcgggaccgaggacgagacaggcgctctcttggggccgctcgcttccctcacccgcgtggacgcttgtaacccccctactgcaagcgcacccgacctgggcgcgggacgaacacgaaggccgcgggacctccacctctctcacgcccgtctccggccacctcgcctctccccccttcgcgctcgcccacgcgctcgacccatctgggctggggcacgcagcacactcactcgtcggcttagggacccccctgtctcgaaacgccgacagttggcgcgctaggtaggggcctgctgcgtgctgacgaacagcttcccgtcaagctccagatgggcagtctccagcaacctctccggcccgggacggtgcttcgtttcgggactcttgagttcatgtccttcgacggcagctacgacatgatactccttcctccgccgcgcgacaacgacaatggcggccgacaacccgcccgccggcggcggaatcggcgacatcttccccgcgtggtggaagaacaacatccgagctcgctccgtcccctcccccgccaacggaggaggaggcgaggcaaccaaggccaagcgggaggccgcgcttcgtcgactgtcgagcgaatcgacgtccccagcgccccgatggaaggcacgccgggcgtcgacctcgcattcgagacggaggcaggcgtcgtccccccacgacacgctgatctcaagcaagaagacgacgccaacgcgctcgtggaaagcctgcaggacgtcgccctcgtacctgagacgacggtgcaaccagtccccgatgtgactacgtcgctcctcgtcgaccaaaaggtaccgactaactcctatcttacgtcatttcgactcggcctcaacccgccaaacgacctcgctttggcgggcgctctcatcgaggcgagtgcaaccccactggggtttcgtatgcggtcgccttgggaccggttgacggacgtctcaacctacgggccctctgggtccgaggaagatgacgatcccagcatctgttgggatttctccggacttggcaaccccagtgccatgcgggacttcatgaccgcatgtgactattgcctctccgactgttccgacggaagccgcagccttggcgacgagagctgcggcccaagacgcgaatgtttccacatcgagctaggggatccctccgaaggcaaccatctcggcatgccggaggacggtgatcttcctaggccggtgcctcgcgccgacatcccacgggagctagctgtggtccccgctccggcggggggttacgacccacaactcgagcaagtccgcgaggcgcaggccaggctcaatgagggaacaggagcgcttgagccgatccgtcgggacgtcgggcaggtatgggcgggccaacccccggccggagaaatacgtcacctgccccaaggtctccagcaccgcgtcgccaacgatgtcagggtcaggccgccgcccgcatctagcggggttggccagaacctggcagccgcagcgatgctcctccgcgcgatgccggagccatcaaccaccgagggtcggcgaatccagggagagctcaagaatctcctggaaggcgctgcggcccgacaggccgagagcactgcctcccgaaggcaggggtacccctcggaacctcatgacgcgacttcccgattcatgcgggaagcctcggtctacaccgggcgcacgcgtaacaccgcgcctgcggccccgggccacctcggcaacgagcaccatcgacgcgaccgtcgggcccacctcgacgaaagggtgcgccgaggctaccaccccaggcgtggggggcgctacgacagcggggaggatcggagtccctcgcccgaaccacccggtccgcaggccttcagtcgggccatccgacgggcgtcgttcccgacccggttccgacccccgactactatcacgaagtactcgggggaaacgagaccggaactgtggctcgcggactaccgccttgcctgccaactgggtgggacggacgacgacaacctcatcatccgtaacctccccctgttcctctccgacactgctcgcgcctggttggagcacctgcctccggggcagatctccaactgggacgacttggtccaagccttcgccggcaatttccagggcacatacgtgcgcccgggaaattcctgggaccttcgaagctgccggcaacagccgggagagtctctccgggactacatccggcgattctcgaagcagcgcaccgagctgcccaacatcaccaactcggatgtcatcggcgcgttcctcgctggcaccacttgccgcgacctggtgagcaagctgggtcgcaagacccccaccagggcgagcgagctgatggacatcgccaccaagttcgcctctggccaggaggcggtcgaggctatcttccgaaaggacaagcagccccagggccacccatcggaagaggctcccgaggcgtctgctccgcgcggcgccaagaagaaaggcaagaagaagtcgcaatcgaaacgcgacgccgctgacgcggaccttgtcgccgccgccgagcacaagaaccctcggaagccccccggaggtgcaaacctcttcgacaagatgctcaaggagccgtgcccctaccatcaggggcccgttaagcacaccctcgaggagtgcgttatgcttcggcgtcacttccacagggccgggccacccgccgagggtggcagggcccgcgacgacgacaagaccgaagatcaccaagcaggagaattccccgaggtccgcgactgcttcatgatctacggagggcatgcggcgaatgcctcggctcggcatcgcaagcaagagcgccgggaggtctgctcggtgaaggtggcggcgccagtctaccttgactggtccgacaagcccatcaccttcgaccaggccgaccaccccgaccatgtgccgagcctggggaaatacccgctcatcgtcgaccccgtcgtcggcaacgtcaggctcaccaaggtcctggtggatgggggcagctgcctcaacatcatctacgccgagaccctcaagctcctgcgcgtcgatctgtcctccgtccgagcaggcgctgcgcccttccacgggatcatccctgggaagtgcgtccagcccctcggacgactcgacctccccgtctgcttcgggacgccctccaacttccgaagggagaccctgacgttcgaggtggtcgggttccgaggaacctaccacgccgtactggggaggccatgctacgcgaagttcatggccgtccccaactacacctacctaaagctcaagatgccgggccccaacggggtcatcaccgtcggccccacgtacaaacacgcgttcgaatgcgacgtggagtgcgtggagtacgccgaggccctcgccgagtccgaggccctcatcgccgacccggaaaacctctccaaggaggtgccagacgtgaagcgccatgccggcaacttcgagccagcggagacggttaaggccgtccctcttgaccccagcggggacacctccaagcagatccggattgggtccgggctcgaccccaaataggaagcagtgctcgtcgactttctccacgcaaacgccgacgtctttgcgtggagtccctcggacatgcccggcataccgagggatgtcgccgagcactcgctggatattcgggccggagcccgacccgtcaggcagcctctgcgccgattcgacgaggagaagcgcagagtgataggcgaggagatccacaagctaatggcagcagggttcatcaaagaggtattccatcccgaatggcttgccaaccctgtgcttgtgaggaagaaaggggggaaatggcggatgtgtgtagactacactggtctcaacaaagcatgtccgaaggttccctaccctctgcctcgcatcgatcaaatcgtggattccaccgctgggtgcgaaaccctgtccttcctcgatgcctactcagggtatcaccagatccggatgaaagagtccgaccagctcgcgacttctttcatcacgccattcggcatgtactgctatgtcaccatgccgttcggtttgaggaatgcgggcgcgacgtaccagcggtgcatgaaccatgtgttcggcgaacacatcggtcgcacggtcgaggcctacgtcgatgacatcttagtcaagacaaggaaggcttccgacctcctctccgaccttgaagtgacattccgatgtctcaaggcgaaaggagtcaagctcaatcctgagaagtgtgtcttcggggtgccccggggcatgctcctggggttcatcgtctctgagcgaggcatcgaagccaacccggagaagatcgcaaccatcaccagcatgggacccatcaaggacttaaaaggcgtacagagggtcatgggatgcctcgcggccctgagccgcttcatctcacgcctcggtgaaagaggtctgcctctgtaccgcctcttaaggaaggctgagtgtttcgcttggacccctgaggccgaggaagccctcgggaacctgaaggcgctccttacaaaggcgcctgtcttggtgcccccggcggatggagaagccctcttggtctacgtcgccgcgaccactcaggtggttagcgccgcgattgtggtcgagaggcaagaggaagggcatgcactgcccgttcagaggccggtctacttcgtcagcgaagtgctgtccgagaccaagatccgctacccacaagttcagaagctgctgtatgctgtgatcctgacgaggcagaagttacgacactacttcgagtctcatccggtaactgtggtgtcatccttccccctgggggaaatcatccagtgccgagaggcctcgggcaggatcgcaaagtgggcggtggaaatcatgggcgaaacgatctcgttcgcccctcggaaggccatccagtcccaggtgttggcggacttcgtggccgaatgggtcgacacccagctgccgacggctccgatccaaccggagctctggaccatgtttttagacgggtcgctgatgaagacaagagccggcgcgggcctgctcttcatctcgccccttggaaagtaccagcgctacgtgctacgcctccatttcccggcgtccaataatgtggctgagtacgaggctctggtcaacgggttgcggatcgccatcgagctaggggtcagacgcctcgacgcccgcagtgactcgcagctcgtcatcgaccaagtcatgaagaactcccactgccgcgacccgaagatggaggcctactgcaatgaggttcgacgcctggaagacaagttcttcgggctcgagctcaaccacatcgctcggcgctacaacgagactgcagacgagctggctaaaatagcctcggggcgaacgacggtccccccggacgtcttctcccgggatctgcatcaaccctccgtcaagatcgacgatgctcccgagcccggggcaccctcggcacagcccgaggcaccctcggtacagcccgaggcaccctcggcccccgagggtgaggcactgggcgtcgaggaagagcagagcggggccacgcctgatcgagattggcaggccccgtacctgcaatatctccgccgaggagagctaccccccgaccaagccgaggctcggcgggtagcacgacgcgccaagtcgttcgtcttgctgggcgacgaggaggagctctaccatcggagcccctcgggcatcctccagcgatgcgtctccatcgccgaaggtcaggaactcctgcgagaaatacactcgggggcttgcggccatcatgcagcgcctcgagcccttgtcgggaatgctttccggcaaggcttctactggccaacagcggtggctgacgccactagaattgtccgcacctgcgaagggtgccaattctatgcgaagcagacccacctgcccgctcaggctctacagacgatacccatcacctggcccttcgctgtatggggtctggacctcgtcggtcccttgcagaaggcgcccgggggctatacgcacctgctggtcgccaccgacaaattctccaagtggatcgaagtccgacccctgaacagcatcaggtccgagcaggcggtggcgttcttcaccaacatcatccatcgcttcggggtcccaaactccatcatcaccgacaacggtacccagttcaccggcaaaaaattcttggatttttgcgaggatcaccatatccgggtggactgggccgccgtggctcatcccatgtcgaatgggcaagtagagcgtgccaacggcatgattctacaagggctcaagcctcggatctacaacgacctcaacaagttcggcaagcggtggatgaaggaactcccctcggtgatctggagcctaaggacgacgccgagtcgtgccacgggtttcacgccgttcttcctggtctacggggccgaggctatcttgcccactgacctggaatacggctccccgaggacgagggcctacaccgaccaaagcaaccaagctagccgagaagactcgctggaccagctggaggaggctcgggacagggccttactacactcggcgcggtaccagcagtccctgcgacgctaccacgcccgaggggtccggtcccgagacctccagatgggcgatctggtgcttcggctgcggcaagacgcccggggaaggcacaaactcacgcccccctgggaggggccattcgtcatcgccaaagttctgaagcccggaacatacaagctggccaacaatcaaggcgagatctacggcaacgcttggaacatcaaacagctacgtcgcttctacccttaagatgtttccaagttgttcatatacctcgcacctacgcaaagtttagtcgtcaaggaagggtcgacctagcctcggcaaagcccgaccctccctcgggggctaaaaggggggagaccccctctgcgtcgaatttttcctcgaaaaaggatctctttttagcaggatttctttcgtgcttcttgactacttcggaaagcggatcctggaaacgacggagtacacgtaagcagccaaggctgaccgagccgagggactcctacgcctccgggatacggatacctcactcatcaccttctgcgataagtaactcgcgttcggataaagcgactccgtggaccgaacaagtcttcacgttcggaagctctcctgccgaagcagtccttcaagctttctcgactaagtcggggacagggcctcacggatgggtgaaagtacgcgtaagcggcaaggccgaccgagccgagggactcccacgcctctgggatacggatacctcactcgtcccttccgcgagaagcaactctcgcccacacaaacatccctgttaccggcagagagtccagatgctcgaaacaagaggaaaaagacgcagctttgcaagcacggcgagggtgtgttttctggcctcggcggccgcagaaggcacacgctacatgacgatctgatcctgcaggctcgggtcttcacgctgaagggagccgtagcaccctcggcatcgacggcgtcttcagcaaagtccgacccagcctcggatggcggcgcgatcagagactcctctgggaatccggcccgagcaggcggctcggccggttacccctggggcctcggccgaccggcttccaagggcgccagcccgacccgaggcctcggctgatcgactccggcgtcggctccgctgacggacaacccggctaggctccggccaaccaggttcccattctcgagccaactccgcctctgttcatactggtatcgctacccctggcctcggctcatcgaagagcggccgaggggtctctttaactaagctagaggagccccagacaacaaggccgatcaagccgagggattcctacgcctccgggatacggatacctcactcgtcaccttgacacggggcgactcatgcttggtgaagcggttcagataatcaacaggcgagacttagtgctcgaaaataaggaaaaacacggctccgtgccgaaattacatacatgttcaggcctcgacagccacaatgaacaaaaaacactggcattcgaagtgccattacaaacggaactccggttcccctccgcaggtacgaacaaccccactccgagggggaaggcctgcggagcaacagaagaatgatgagcggctcgctgccgcccgttctaaccatgacgacaaccacccccgccccgggcagcgaagcggcttaggcagcggcttcggggcaggtgccacgacaggagggctctcccccgctgaggacgagaaccagccattcaggccgggaggcggagacccagggccactggcgccctacctgtcccgacatggctggaggaagtccccatgggactcaaggacgccattctcccccaggcatggggagaagaaaaaggcagccgactcatgcgggggcagccccctgactcgcctcatcttccatcttggcctggatgacgaaaatccttgaggccgagggaggagtagaggccgcagcctggcccgctttccccaccgtcgaactggaggtcaccatcttgggtgaccgccggtggcggggtgcggccaggctgcgtgatgaaaatccttgaagccgaacgatggctgagaggtaccaactcccatggagttgcgttcctccaacgaggaggcggaaaggcggcggataccccccatccgggggcttggaagatggaaagacacgacgcataagggaggaagaaaacatggttgccttctgaaaggagtctccctccttttaaaggcaactctccctacgtgcgcccccagacgccacgagctgagtcttctccaacacgctccaaggccctcccctgcggctcggggggctgggtcccgcatgtcatgcaaaccggctcagagtagaagaagccaaaccgccgcgcgtggtgcgcacaaccgcccagcggttacaagcgaccccccacttttgcccagaccaacgggcggaaggggcgggcagccatgcaggcggcatgcaaccgcgccaggtggacgcgcttctccgacttctgacacgccagcttggaggcccaggcccacgcgtcaagcaaccggcgcgccagttgctgcatgcaagcaaccgcaccgccacttgtgccaccgtcgcacctcttcgattgcggagcctgtgccgcgactcgaggcgacccagcgcgcgacccagcagcgccagcctggcgcgttggtcaaagcggccgaaagtgggccggcagtaatggcggtggcaggcgggcgggcgcagcagtcacgtcgtcagccaggctcacgtcccatcctgggacagcaagagagcctcctcccacggcgtgaagacggtgcacccgtgatccgttcctcgaacggctcgcgcacgcgtaacggccgccccgccaaccactcgccccgtcgcattaactccgcggcgggacgggcggcgattctggcaggagaagcggacgacgcttcgccttcgccgcaataaccgcgtcaaaaaaggtacgccacgtcgtttgatttcgtatccttttcctttttcctctttctctatctcttgcaatagggaccgggaaagggggataccccgaaaaggatccttctctgcgaaggaaccgggctccgagcccctccctactgatcagaggttcgaagactggccctccgaagggttcaacagtcgcctcagatcgcgtgggcccgacacccactactggtcaggggttcgaaggccagccccccgaagggttccatggccgcctcaggctactcaggctccgcgcccactactgatcaggggttcgaaggctggcccccaaagggttcacagtcgccttagacaccgagcgagggatgaccaggggtacgttcgatacataaccgaggctcgggctgcgctcccgaggtaccctaggacatttccgagaccagcgggagcgatcttgtaacggaatcccatcggagggaggcatcgagccctcggaccccgtcgccaggggaccgggtccggcaaatcacccgcaggtacttttgggcgtgcctctgggcccctagccgacccccaacgaacggggcacggacgtccactcggattacccgcttgcagctcaccggagacaccatgttcggtgcccatcgagggtaacatggcgcactcccccccctcctccttgtggaaaggcgacgtaggggcgtatgtaaaaaagccgagtctgtccctgatcgtcctctcgccctgtgcagaggctcgggggctgctctcgcaaacccggctccggccaaaccgttgacagcgtcaacataccagcccgagagcttgggccccgaccgtgcacccgggctacggccagttcgcatgagggaacgaccagaccagccgaagcattacgcaaggcattaagacctcgaaggagtgtaaccactcctccgaggcctcgggggctacacccggcgggtgcgctcgcgcgcacccaccggaacgaaatgcaaccgagaaaggctggtccccttgcaaaaaagtgcgacggaagcctccaagcgagtgctatcactcccttcgaggctcgggggctactgtcggggaccataattaggggtaccctcaagacgcctaattctcagctggtaacccccatcagcataaagctgcaaaggcctgatgatgtgcacccgttgggtgattgcccgatctttcgatgagagggtgtggaataactcgattgggggaggagacgacgttcacggcccgactacagccttccaaagacgctgcgccttagcaaccgatacaccacctcctatggctgtcacgatcttgtggagcgtgacaccctggccactagggcactcgtcctgcaagcaatcgaagaactagcaagaacaagtagaacaagtactgaattaccagatctaaatgtaggtttaaagatcaaactacaatatggtggggttccgaagacaagaagacgggcggctgaactagcacgcgcgcttgcaagcaagtagcgagagctaaacttgatctaaacaaaacccgctgttcttggtggcggctagggggtttataaacatgggaggacgaccacaagggtattggggtcgtgctgcaaccctaggatgcgtccctaatggacctaacttgatacacgacccattgggccaaaatagggtgacgcagcaccatgggcagaaaaggcaggaaatgtctcggtaagaaaacaatgattacggcggcctcagaacagatatgactataattccggatccatatgaaagtagacttgataagctttccatgttgtgcttgaacattccaatccgagcccgcatctgaccgtggtgaccgtcacaagttggtgttcttctgcagtccgaatccagcatgttcaaatccttttccctttcggtcttctccctgattcctaagcaaaacaagagtgcacgggtctccatggtctaaatataatggacatgaactcaagagtgtaatcacctgatggttgagttgacgagcacgagcgcgagtaatgggaccagaaattggtacttgtattggtatagatgcatcagtagtgtggatgtcttcatcataacctttgtcgagtagttcttgcacttgtcgctgaatttcttttgtttcctctggatatgtcctatatggcgcacgattcggcaaagatgcaccaggaataagatcaatttggtgctcaatccctcgtataggtggcagcccctctggtatctcacttggaaatacatcagaatactcctgcaaaatgttagtaataacaggaggcaaagaatgctgcatatcttgaattgaaatcaaagcatccttgcataccaaggcgtaggcaacagtagtggaagcaaataattcattaacatcagtttttgttgcaagcaagcaatgtcctttcaattttatcccatctttgttattaccaacagctttaatattcttgttgttctcagttttagctttggtagctttagcaacatcatcacgcacaatagcctcaggggacatgggaagcaaaataattttcttatcatggtgtatgagagaatattgatttgatctaccatgatgcatacaatctgaatcaaattgccatggtctacctagcagaatattacaagcatccataggcacaacatcacagtcaacaacatcacgatatgaaccaatagcaaaattaattcgtaccagcttggttaccttgaccttaccactattgttgagccattgaatgtgatatggatgcgggtgcagtttggtcgtaagtgtaagcttctctaccatgtcgctgctagccaagttgttgcagctacctccatcaatgatcaaacgacatgaacgctccttaatgacacactttgtttgaaacaacgtatgtcgctgattctgctctgccttctccatttgtgcactaagcacacgctgtacaatgaggctctcataatgctctgcatcatctgcaccaatctgttcttcgggtggttccttagtgcctgcatcatcagccgcaagcaaagcaagtgtagcttcatccaaatcactagcagaggaatacccaccatcgtcttttaccaccaaaacacgctgattaggacaatcacgctgcacgtgtccatagcccttgcatcgataacacagaacatctcttgttctacctgtggaagctactgaagaggcactacctgcgggtttctgggcagatttggttgctgaatttgtggaagatgcacgtggtttgtcgctggaggaaggcgggggtgctggtcgacttggcgaaggagttggtgctggtgtacggccggtcatggacgtagtcgtgcgctgttgccatggtgtagattttcctgcagaaacattagaccttgcactagcacgtcgtccctgcacttccctttcagctttgcaagcaagatgaaacaatcgggttacattagcataatctttataagcaaggatgtcctgaatttccctatttaacccgcccaaaaatctagccatagcagattcctcaccctcctctatgttacaacgcagcatacccatttgtaattcctgataatattcttctacacttttagtaccctgtctcaattgttgcaacttgtttaacatatcacgtgcataataagaaggaacaaatctagcctgcatgacccgtttcaacgcatcccaagtttgtggcatgttattaggattcttcttaccatgttctatccaccaaacagaagcaaattcagtaaactcactagtagcagctctaacccgcgcattctcaggaaattcatggcatgcaaacttttgatcaaccgcaatctcccaagtaatgtaagcatcagggtcatatttaccatcaaaaggaggtattttaaatttaaccttactaaaagcatcatcattaccatgtacctcacgtcggcgaaaaccacccatacctctacggttagtacgtagtcgccggcgattaggtgcttcttggtcatcttgttcagtatcagcaacatagtcatcccagttaccttcggcgccttcatcacgcccaccattgatattagcatgcatctcatcaaaccgcctcaagagtgcgacaaggctcttgtcaatatgagcaactgtcatttccacatttgcaagtttggtgttcgtgtcgatctgtgtggcctccaattgccccatcttttcattcgtcacctgcatgtcattatcaagaccttccgtgtgcgtcttcaccagccttacaaagtgttgtatgatacccttggtgcgaggagagtgtggcatattacgagaagcatcatcaacctccaatcctgccatggttagacgaacagaggcaacaagaaaaaaaacgtgaaggaatgaaaactctacaactattaggatgtagctactgcaaggcgctcactctcaacctgccacacaagctcttaccaattcttaccttgcacaacaggaggggtcagcaaccaacaagtctgcaaccgtggaataagtgtattggtgccgcagcaacacgacctgtcaaactgtagtcgaaatatgtagagttgtaggtgggctgaagcaaggaatacactagtaccacgttagttacaaaagcaagctgaataatcgttcaacggtggtactgtgctggtcctaggctaaaccaggctagagacgtgagcctaggcacaaaggtagtcactgaaaaagaacaactagcacagcacaaagagaattaacagattaagagattcagcccccttcttcttcttttgcttttttttcttttctattcttttttttctttcttcttcttctgttttttttgcaggggcctaaacccttttttttactatgacaacccaaacaataaagatattgctaacagcccctttaaatcagatttaacaaatcttgttaatatagaaagtccagaaatctctacgatgattgcggagcgctcagaacgaattttgagataaggtcagatccgttggaaagaagataagataagctttccagattgtatttaaacttccaaatcggatatgatatgtatccgtggtggcaaaaacgaaccagagatgtttttggtgatggtggatctcgtggtgaccaaaacgtggtagaactcaaaactctaaaggaataaactaagaccagcaactcgacacaaccgatgcaaccaaaaactcaacaagccctaactaagtagtactagtaaatgctcaatggtttataggattgcggtaaaactaatctactattttttggctttttctggactataggagataagaaaacagcgaagaaaagtaaatctctcaccgataaaccttgctttgataccaactgatgtgcacccgttgggtgattgcccgatctttcgatgagagggtgtggaataactcgattgggggaggagacgacgttcacggcccgactacagccttccaaagacgctgcgccttagcaaccgatacaccacctcctatggctgtcacgatcttgtggagcgtgacaccctggccactagggcactcgtcctgcaagcaatcgaagaactagcaagaacaagtagaacaagtactgaattaccagatctaaatgtaggtttaaagatcaaactacaatatggtggggttccgaagacaagaagacgggcggctgaactagcacgcgcgcttgcaagcaagtagcgagagctaaacttgatctaaacaaaacccgctgttcttggtggcggctagggggtttataaacatgggaggacgaccacaagggtattggggtcgtgctgcaaccctaggatgcgtccctaatggacctaacttgatacacgacccattgggccaaaatagggtgacgcagcaccatgggcagaaaaggcaggaaatgtctcggtaagaaaacaatgattacggcggcctcagaacagatatgactataattccggatccatatgaaagtagacttgataagctttccatgttgtgcttgaacattccaatccgagcccgcatctgaccgtggtgaccgtcacaagttggtgttcttctgcagtccgaatccagcatgttcaaatccttttccctttcggtcttctccctgattcctaagcaaaacaagagtgcatgggtctccatggtctaaatatgatggacatgaactcaagagtgtaatcacctgatggttgagttgacgagcacgagcgcgagtaatgggaccagaaattggtacttgtattggtatagatgcatcagtagtgtggatgtcttcatcacctgatgggtacgattaagtcagggatcagtccacacgagtgacttgatcacgcttcgctcgtgcctagcctcggccaagggcagccgacctcgagagacttccgtctcgcccgaggcccccctttttaacggcggacgcacctccggctcgcccgaggccttggcttcgtctagaagcaaccctgactaaatcgccgcgccgactgaccaggttgcaggagcatttaacgcaaaggtggcctgacacctttatcctgacacgcgccccccggcagagccgaagtgaccgccgtcactccaccgctccactgaccagtctgacagaagaacagcgccgcctgcgccacaccaattacagtgccactcgacagagtgagtctgacaggcagtcaggccctgccgaaggcgccatgggaaactccgctccgcccgaccccagggctcggactcgggctaagacccggaagacggcgaactccgctccgcccgaccccagggctcggactcgggctaagacccggaagacgacgaactccgctccgcccgaccccagggctcggactcgggctaagacccggaagatggcgaactccgctccgcccgaccccagggctcggactcgggctaagacccggaagacggcgaaatccgctccgcccgaccccagggctcggactcgggctaagacccggaagacgacgaaactccgcctcgcccgaccccagggctcggactccgccctggcctcggccaaacgatctccgcctcgcccgaccccagggctcgggctcggcctcggcaacggaagacagactcgacctcggcttcggaggagcccccacgtcgccctgcctagggcacaggcccgccacgtcaacaggaagcgccatcatcgtcctaccccgaatcgactcgggtcacggagaacaagaccggcgtcccatccggccagctccgccggatgggcaatgatggcgctccacgagctctgtgacgacggcggccctcagctctcttacggaagcagggcgacgtcagcaaggacccgaccgctccaacagctgtccctccgccaggctccgtcgctcctccgacagccacgacatcacgccagcaaggtgccaagacctctccggctgccacattggcatgtacctagggcgctagctctctctccgctagacacgtagcactctgctacaccccccattgtacacctggatcctctccttacgactataaaagggaggaccagggccttcttagaggaggttggccgcgcgggaccgaggacgagacaggcgctctcttggggccgctcgcttccctcacccgcgtggacgcttgtaacccccctactgcaagcgcacccgacctgggcgcgggacgaacacgaaggccgcgggacctccacctctctcacgcccgtctccagccacctcgcctctccccccttcgcgctcgcccacgcgctcgacccatctgggctggggcacgcaacacactcactcgtcggcttagggaccccctgtctcgaaacgccgacaaaatctgataccaattgatgtagctgaggtgcccgatctttcggcgagtagagatatttccgatttggcggaagatgacccttgcgatccgactacgatgagcaagcccgaggcgccaatgcaatcgctgaaccaactccctgtggttaccgaccttgctgatgcgagatcggcctgatcacgaagatcgtttcctgtgcgcaatcgaagaacgaacaagaaaaagatgcgagcaatctaatctattactcgagggtggagttctgaatacacgaagacagcgcagatttgcgcgtgttcgagagtagctaaggctaacgtaaaacaaaactcaaggaataaaggaggcgcagctcctggataaatagagagggggcgcagcccctaggggcggccaaccctaggtcgtccattatgggccgcagttgggctggtcgtctattcttccgggccttcgttctttaacagcataatgtagttcaattctcttgcacgggcccgagtcactggcccaggtggaaggggtggcgcctggactggggaagatggtgcctgggctggagaaggtgctgctggtgtagatgtgctcgtgttggtgttgatgtcctcatcaaacatgcccaatccactacttcaggtccaaaagacatgtttggagtggtttcgcgcaatttcattgccgcacgtcacccattccgaaaacgggtgtcggggtgcatacaaagcacgagtttttgccaccggaaccatttcttcgttttttgcaacggacatgcccaatccactactttaggtccaaaacacatgttaagagtggtttcgcgcaatttcgttgccacacgtcacccattccaaaaacgggtgtcgggggtgcatacaagcacaagtttttgccaccggaaccatttctttgtttttcgcaacgaacatgcccaatccactactttaggtccaaaacacatgttaagagtagtttcgcgcaatttcgttgccgcacgtcacccattccgaaaacgggtgtcggggtgcatacaaagcacgagtttttaccaccggaaccatttcttcctttttcacaacgaacatgcccaatccactactttaggtccaaaacacatgtttggggtggtttcgcgcaattttgttgccgcacgtcacccattccgaagacgggtgtcggggtgcatacaagcacgagtttttgccaccggaaccatttcttcgtttttcgcaacgaacatgcccaatccactgttttaggtccaaaactcattttggggtggtttcgcgcaatttcgttgccgcacatcactcattccgaaaacgggtgtcggggtgcatacaaagcacgagtttttgccaccggaaccatattttcgtttttcccaacgaacatgcccaatccactactttaggtccaaaacgcatgtttggggtttcgcacaatttcgttgcagcacgtcactcattccgaaaacgggtgtcggggtgcatacaagcacgagtttttgccaccagaaccatttcttcatttttcgcaacaaacatgcccaatccactattttaggtccaaaacacatgtttggggtggtttcccgcaattttattgccgcacgtcaccaattccgaaaacgggtgtcggggtgcatacaagcacgagtttttgccaccggaaccatttcttcgtttttcgcaacgaacatgcccaatccactactttaggtccaaaacatatatgtttggggtggtttcgcgtgatttcattgctgcacgtggtgcattccgaatacgggtgtcggggtgcatacaagcacgagtttttgccaccggaaccatttcttcgtttttcgcaacaaacatgcccaatccactactttaggtccaaaactcatgtttggggtggtttcgcgcaatttcattgccgcacgtcacccattccgaaaacgggtgtcggggtgctgatgaacccaacgggtagaagggtgcccgatctttcgatgagagatgatggaggtggaaaaacttgctggagaacgacgttggctgcccgacacacgcgtttacaaggaagtagcaaaggctaaacttacatcaaacaaaacccaagttctttggtggctgctagttgcttaaatagagaaataggaagaaggaattctggtggagtcatgaagttccctcggcagttcctggacgcctcgggtgtagtctcccattaattcttgatccaccagcaagtagacgaagggagctttccacaaagtatttatttgcattaaacgactttggaagttggaagatatgccccatttaaacttgtacttgatgctgttacgaaatcctctcgggtgcagcaacctttattgccttgttgccttctccagtccaagatggttcacctcccaaacacctgagcataataaagtcatcacaaggctttagtacctcatttaaagaagaattagcttcaatagcaaggaacgagttcacctgataattaagtttacgtgcacgggctcgtgtcattggtccttgattagctacgaatggtgaagtggtcactggtatggttgtatcaatgatagtgatgtcctcatcatcctccccttcttgcaacaaagtcgtcctcgactcaaacgtgtcattctctctcaagtatggtgttaaatctgcaatgttaaaagaggaactgaccccaaaatctgcatgcaactgaactttatatgcattatcattaattttgtgaagcactttgaagggtccagcagctcttggttgtaatttagatttgcgtatatcagggaatctatctttccttaaatgcacccatactaaatcaccaggttcaaaggtaatatgctttctacccttgctacctgcttcttcatacttagcattcatggctttaatatttgctttagtttgttcatgcagctttataatcagctcagcacgacgagaagcatcaaaattcattatttcagaatgtgggatggcgataagatcaataggaggcaaattcaatgtgaggcaaacattcttcccacaattttaaaagggcatagtttagttgtagaatgctgagaacgattataagcaaattcaatgtgaggcaaacattcttcccacaatttgatgttatgtttcagaacagccctaagcatggtagataaactatggtttacgacttcggtttgtccatcggtttgagggtgacaagtagtagaaaagagcaatttagttcctaacttagcccataccgttttccaaaaatgactaagaaatttggtatcccgatcggacataatagtgtttggaaccccatgcaaacgaacaacttcacgaaagaacaaatcagcaacatgggtagcgtcatcagttttgtgacatggtataaagtgtgccatttttgaaaatctgtccacaacaacaaaaatactatccctccctttctttgttctaggtagccctaaaagaaagtccatagaaatatcctcccatggtgcactaggaactgggagaggcatgtataaaccatgtgaattaaggcgagacttagctttttgacatgtagtgcagcgagcaacaattcgctccacgtctcttctcatcttcggccaaaagaaatggctggccaggatgtcttctgtcttcttcacaccaaagtgtcccatcaacccaccgccatgtgcttcctgtaataataatatatgcacggaaccagctggaatccataatttgttagcccgaaacacaaagccatctgtgagaacaaatttgttccatgtccttccttctttacaatgtaatagcacatcattgaaatcagcatcgaaaacatattgttgtttaattgtttccaagccaaaaatcttaaaatcaagttgagacaacatggtataacggcgagacaaggcatctgcaatgacattatcttttcctttcttatgtttgatgacatagggaaaagattcaataaattcgacccacttggcatgcctacggttcagatttgtttggctccttagatgctttaaagattcatgatcagaatgtataacaaattctttaggccataagtagtgttgccatgtttccaaagttcgaactaaggcatataattctttatcataagtggaatatttcagacagggtccattcagtttctcactaaaataagcaacaggctttccttcttgcaacaagacaccacccaaaccaataccactagcatcacattccaattcaaaagtcttactgaaatcaggtaattggagaaggggtgtatgagttaacctatccttcaatgtttcaaatgcaacctcttgcgccttgccccacgaaaatggagcacccttcttagtaagctcgtgcaatggccctgcgatggtgctgaaatctttcacaaatcatgatagaaccccgcaagcccgagaaagcttcggacttgcatgaccgtggtagggactggccagctatgtatggcctccacgttagcctgatcaacttcaattccctgcggtgtcacaacatagccaagaaaagagacccggtctgtgcaaaatgtgcacttgtcaaggttaccaaataagcgcgcttcatgtaaagcattgaaaacaacacgtagatgatcaagatgatctactagacatttgctatagatcaagatgtcgtcgaagtagacgaccacaaatcttccaatgaaagcacgtaaaacctcattcattaatctcatgaaagtactaggtgcattagtgagaccaaaaggcatgactaaccactcatacaaaccaaacttggttttaaatgccgttttccattcatcccctagcttcatgcaaatttggtgatatccactacgtaagtcaattttagagaaaatcatcgagccactaagttcatccagcatatcatctaacctagggataggatgacgatatctgatggtaatgttattaattgctcgacaatctacacacatgcgccatgagccatctttctttgggactaataaaacagggacagagcaaggactaagggactcacgcacataacctttatcgagtaattcttgtacttgtcgctgaatctccttggtttcttccgggttcatcctgtatggcgctcagtttggcaaggaagcccctgggatgaggtcaatctgatgctcaattcctcttatcggtggcaggccaggtggcacatcgtttggaaatacatcagcatattcctgcaaaagattagtgacagtagaaggcaaagtagatggtatgttgtgaagtgagaacaaagcatccttgcaaataaatacatagcagattgaagcaacatcatttaattcaagcaaatcagatttggaagcaagaaaacaagcacttttcagttgtatttctgtcttcctcacttgagcagatttagaattgtcactcttatgttgtaccaactcctttgcagcacctagatttttattatgaacagatttatttttctctttgcaagctctagcaacttcatccttcaaaatagcatcgggggacatggggtgcaatacaagcttcttctcattatgcataaaagagtagtgattggttttaccatgatgcacggtgtccttatcaaattgccatggtctaccaaataacatagagcaagcttgcataggtaccacatcacaatcaatataatcatggtatgaaccaattgtaaattccacacggaccatacgtgttaccttaagcttaccactgtcgttgaaccattggatgtagtaggggtgtggatgtggaagctgatgaggacatcaacaccaacacgagcacatctacaccagcagcaccttctccagcccaggcaccatcttccccagtccaggcgccaccccttccacctgggccagtgactcgggcccgtgcaagagaattgaactacatcatgttgttaaagaacgaaggcccggaagaatagacgaccagcccaattgcggcccataatggacgacctagggttggccgcccctaggggctgcgccccctctctatttatacaggagctgcgcctcctttattttccgagttttgttttacgttagctttagctactctcgaacacgcgcaaatctgcgttgtcttcgtgtattcagaactccaccctctagtaagagattagatttctcgcatctttttcttgttcgttcttcgattgcgcacaggacacgatcttcgtgatcaggtcgatctcgcattagcagggtcggcaaccacagggagttggttgaaagaaatgcattcgcggagcgggattgctcatcgtatccccacccccaggttcatcttcagggggtggggtattgtcattactttgcgagagaccacccccatcatgatgctgtggacgtaatttaccggattggggtaagttcggtgggaaagcccctcgatataattaaggtggcggcggactcctgtttgtatgggatccgacgcgccgttttttaaagggggaaaaatgacggccggaaaaattcggacgtaaccagaacggaaacctcttgttttgggagcttccagtgtgggggggtgcgggcgtgttcgcaagacgaaaattcggggaaattttggacgaggggtggcactcacggcgagcgtgtctaagcctaatctgttccttgtatatcaagaatgggggtggccctggctggcgtaacaaagagtgagcgggaaaaggcccggctaagcaac

SEQ ID NO: 397 - DNA, 684 bp, Zea mays
  source (0)...(0): Zea mays BAC clone full insert sequence contig bacm.pk024.f21.fis1
  misc_feature (1)...(684): n = A,T,C or G
ngacccgtnnnnnnnnnnnnnnnnnnnnnnnnnnnnnnnnnnnnnnnnnnnnnnnnnnnnnnnnnnnnnnnnnnnnnntaaaatatgcaacagtttgccttcttgtaacaaaacaccacccaatccaattccactagcatcacattgaagctcaaaagtcttatctttcagcacgttngaaagagtgctcttgtactttgccccaacaaaaatgcactcccttcttcgtaagctcattcaaaggtgcagcaatggtgttaaagtccttcacaaaacggcgatagaagccggcaagtcctaggaaactccgcacctgtgtgatagtctttggcataggccatccatgtatcgcttctaccttggcttgatcaaccctcattccctgtggagtcancacataaccaagaaacgaaactcgatcggtgcaaaatgtgcacttctcaaggttacaaataaacgtgcatctcgtaaagcattaaaacagcacgcatgtgatcaaacatgtcatccatagatttgctgtagatcaatatgtcatcaaagatactaccacaaattttccnattgaggcacacaaaactccgtcattaatctcaagaaaaggcaaggggcttactggacccaaaagcatgactaaccttctacaatcggaactagttttgaagccgtttccatccactccaa

SEQ ID NO: 398 - DNA, 790 bp, Zea mays
  source (0)...(0): Zea mays BAC clone full insert sequence contig bacm.pk024.f21.fis2
  misc_feature (1)...(790): n = A,T,C or G
ngacccgtnnnnnnnnnnnnnnnnnnnnnnnnnnnnnnttacaaaaaacaggcgaggtcgacggtatcgattttccctgatttgcgaaaaacgaagaaatggttccggtggcaaaaactcgtgctttatgcaccccgacaaccgttttcggaatgggtgacgtgcagcaacgatatagcgcgaaaccaccccaaacatgagttttggacctaaagtagaggattgggaatgttcgttgcgaaaaacgaagaattggttccggtggcaaaaactcgtgctttgtatgcaccccgacacccgttttgggaatgggtgacgtacggcaacgaaattgcgcgaaaccactccaaacatgagttgtggacctaaagtagtggattgggcatgctcgttgcaaaaatcgaagaaatggttccggtggcgaaaactcgtgctttgtatgcaccccgacacctgttttcggaatgggtgacgtgcggcaacgaaattgcgcgaaagcaccccaaacataagttttggatctaaactagtggattgggcatgttcgttgcgaaaaacgaagaaatggttccggtggaaaaaactcgtgctttgtatccgacacccgttttcggaatgggtgacgtgcggcaatgatatagcgcgaaacaaccccaaacatgagttttggacctaaagtaaaagattggtcatgttcgttgcgaaaaagaagaattgggttccggtgcaaaaactcgtgctttgtatgcacaccgacacccgtttggaaatgggtgacgtacgacaacaa

SEQ ID NO: 399 - DNA, 789 bp, Zea mays
  source (0)...(0): Zea mays BAC clone full insert sequence contig bacm.pk024.f21.fis3
  misc_feature (1)...(789): n = A,T,C or G
gacccgtatannnnnnnnnnnnnnnnnnnnnnnnnnnnnnnnnnnnnnnnnnnnnnnnnnnnnnnnnnnnnnnnnnttgtgggtaggctgcactcaagtcaaggattagcacgatcaaacaataatgcaaagttgaattatagtgcaaaacacgaaactatattgctggccacaggtgcaaaggatggatggaactagcagaatggcagtaccgtaaatattgtactagtgatgccaaaaaggcactagtagaaatcacaggtgattttgtttttcttttttgtatgatttttttgatatttttctcagcacaagaagcaacaagataggagctacacgaagtttcacctaaaatagatatcagatgtggtctatagaaaattaggaagttctataaaaagcgtgcgagaactttgacgaatttttttctttattttcctgaatttttttgacaattttgtcgaaaccaaacagaatggtgtcaacaagctcctgtaaaaatttcagattttttggacacccgagcgaaaagttatgcccggtttaaggaaggtacctcaaattatgttttcaaacgaccgggatgaaacaaccgtatcctttctccttcgttgttttttgtttctgtttttttttgacgtaaccgaaggagaaaaacaaggaaacgatgttgactcggtttgttttttttttctgttttttttttcgnaaccgaaggagaaaaacaaggaaacggcccgttgactcgtttgttttttcggttttttttttgacgtaaccgaagagaan

SEQ ID NO: 400 - DNA, 798 bp, Zea mays
  source (0)...(0): Zea mays BAC clone full insert sequence contig bacm.pk024.f21.fis4
  misc_feature (1)...(798): n = A,T,C or G
ngacccgtnnnnnnnnnnnnnnnnnnnnnnnnnnnnnnnnnnnnnnnnnnnnnnnnnnnnnnnnnnnntacctgatgtgcatctcgtaaagcattaaaaacagcacgcatgtgatcaacatgttcatccatagatttgctgtagatcaatatgtcatcaaagtatactaccacaaattgtccaatgaaggcacgcaaaacctcgttcattaatctcatgaaagtgctaggtgcattagttaacccaaaaggcatgactaaccactcatacaatccgaacttagttttgaaagcagttttccattcatctcccaatttcatacgaatctggtggtacccactacgcaaatcaactttagaaaagacgatggcaccactcaattcatcaagcatatcatctaaacgtggaatagggtgtcgataccgtatcatgatattattaatagccctacaatcaacacacatacgccatgttccgtcttttttaggcactaaaataaccggaacagcacacggactaagagactcacgcacgtaacctttgtcgagtagttcttgcacttgtcgctgaatttcttttgtttcctctggatttgtcctatatggcgcacgattcggcaaagatgcaccaggaataagatcaatttggtgctcaatccctcgtataggtggcagcgcctctggtatctcacttggaatacatcagaatactcctgcaaaatgttagtaataacaggagggcaagaatgctgcatatctttgattttgaatcaagcatccttgcataccnaggcgtang

SEQ ID NO: 401 - DNA, 541 bp, Zea mays
  source (0)...(0): Zea mays BAC clone full insert sequence contig bacm.pk024.f21.fis5
  misc_feature (1)...(541): n = A,T,C or G
aacgnnnnnnnnnnnnnnnnnnnnnnnnnnnnnnnnnnnnnnnnnnnnnnnnnnnnnnnnnnnnnnnnnnnnnnnnnnnnnnnnnnnnnnnnnnnnnnnnnnnnnngcaaagaaaacggaggacatacttgctggtcatttcttttggcccaagatgagaagagatgtggtgagattggttgctcgttgcacgacatgtcaaaaggcgaagtcacggttaaatccacacggtttgtatttgcctctacccgttcctagtgctccttgggaagatatttctattgattttgtgctggggattgcctaggactagggaagggacgtgaataagtgtggttttggggttgttgaaaagattttcctaaggatgggcaacatttaaatacccatggccaataaaaaactgaacgaaatgccaaccccataattgccgggaatttgggtcccttttccggggaaaaaattggtccggctttgcccattgggaaagggcccccaaaaaacaaaatccgtttttcccggaaacccggggaaaggccca

SEQ ID NO: 402 - DNA, 776 bp, Zea mays
  source (0)...(0): Zea mays BAC clone full insert sequence contig bacm.pk024.f21.fis6
  misc_feature (1)...(776): n = A,T,C or G
ngaccgcgtatagactcctatagggcgaatgggtacaacaccagcggnnnnnnnnnnnnnnnnnnnnnnnnnnnnnngtttggggtggtttcgcgctatatcgttgctgcacatcacccattccgaaaacggttgtcggggtgcatacaaagcacgagtttttgccaccggaaccatttttcgcttttcgcaacgaacatgcccaatccactactttaggtccaaaactcatgtttggggtggtttcgcgcaatttcgttgccgcacgtcacccattccgaaaacgggtgttggggtgcatacaaagcacgagttttcaccaccggaaccaattcttcatttttcataacaaacattcccaatcctctactttaggtccaaaactcatgtttggggtggtttcgcgctatatcgttgccgcacgtcacccattccgaaaacgggtgtcggggtgcatacaaagcacgagtttttgccaccggaaccatttttcgctttttgcaacgaacatgcccaaaccactaacttaaggcccaaaatcaagtctggggtgggttcctgcaatttccttgccgcacgtcacccatttcgaaaaccggtgttggggtgcatacaaagcacgagttttcgccaccggaaccatttcttcgtttttttgcaacgaaatgcccaatccactactttaggtccaaaactcttgttttggggtgttcccccgctaattcgttggcgcacgtcacccatttccaaaaggggtttcggggggcatacaaaac

SEQ ID NO: 403 - DNA, 684 bp, Zea mays
  source (0)...(0): Zea mays BAC clone full insert sequence contig bacm.pk024.f21.fis7
  misc_feature (1)...(684): n = A,T,C or G
ngacggcgtatannnnnnnnnnnnnnnnnnnnnnnntaccaacagggnnnnnnnnnnnnnnnnnnnnnnnnnnnnnnctactttaggtccaaaactcatgtttggggtggtttcgcacaatttcgttgccgcacgtcacccattccgaaaacgggtgtcgggtgcatacaaagcatgagttttcgccaccagaaccatttcttcgttttccgcaacgaacatgcccaatccactactttaggtccaaaactcatgtttggggtggtttcgcgcaatttcgttgtcgtacgtctcccattcccaaaacgggtgtcggggtgcatacaaagcacgagtttttgccaccggaaccaattcttcgtttttcgcaacgaacatgcccaatcctctactttaggtccaaaactcatgtttggcgtggtttcgcacaatttcgttgtcgtacgtcacccattctcaaaacgggtgtcggggtgcatacaaagcaagagttttttccaccggaaacaattcttcgtttttcgcaacgaacacgctcaatcctctactttaggtccaaaactcatgttttgggttggtttcgcgctacatcgttgccgcacgtcacccattccgaaaacgggtgtcggggtgcatacaaagcacgagtttttgctatcgaaaaaattttcctcgttttttcgc

SEQ ID NO: 404 - DNA, 697 bp, Zea mays
  source (0)...(0): Zea mays BAC clone full insert sequence contig bacm.pk024.f21.fis8
  misc_feature (1)...(697): n = A,T,C or G
acgcnnnnnnnnnnnnnnnnnnnnnnnnnnnnnnnnnnnnnnnnnnnnnnnnnnnnnnnnnnnnnnnnnnnnnnnnnnnnnnnnnnnnnnnnnnnnnnnnnnnnnncttttgcaggaatatgctgatgtatttccaaacgaagtgccacctggcctgccaccgataagaggaattgagcatcagattgacctcatcccaggggcttccttgccaaaccgagcgccatacaggacaaacccggaagaaaccaaggagattcagcgacaagtacaagaattactcgataaaggttatgtgcgtgagtcccttagtccttgctctgtccctgttttattaatcccaaagaaagatggctcatggcgcatgtgtgtagattgtcgagcaattaataacattaccatcagatatcgtcatcctatccctaggttagatgatatgctggatgaacttagtggctcaatgattttctctagaattgacttacgtagtggatatcaccaaattcgcatgaagctaggggatgaatggaaaacggcgtttaaaaccaagtttggtttgtatgagtggttagtcatgccttttggtctcactaatgcacctagtactttcatgagattaatgaatgaggttttacgtgctttnaatggaagatttgtggtcgtctacttcgatgacatcttgatctatagcaaatgt

SEQ ID NO: 405 - DNA, 777 bp, Zea mays
  source (0)...(0): Zea mays BAC clone full insert sequence contig bacm.pk024.f21.fis9
  misc_feature (1)...(777): n = A,T,C or G
ngaccgcgtatannnnnnnnnnnnnnnnnnnnnnnnnnnnnnnnnnnnnnnnnnnnnnnnnnnnnnnnnnnnnnnngtgcgacaaggctcttgtcaatatgagcaactgtcatttccacatttgcaagtttggtgtttgtgtcgatctgtgtggcctccaattgccccatcttttcattcgtcacctgcatgtcattatcaagaccttccgtgtgcgtcttcaccagccttacaaagtgttatatgatacctttggtgcgaggagagtgtggcatattacgagaagcatcatcaacctccaatcctgccatggttagacgaacagaggcaacaagaaaaaaaaacgtgaaggaatgaaaactctacaactattaggatgtagctactgcaaggcgctcactctcaacctgccacacaagctcttaccaattcttaccttgcacaacaggaggggtcagcaaccaacaagtctacaaccgtggaataagtgtatcggtgccgcagcaacacgacctgtcaaactgtagtcgaaatatgtagagttgtaggtgggctgaagcaaggaatacactagtaccacgttagttacaaaagcaagctgaataatcgttcaacggtggtactgtgctggtcctaggctaaacaggctagagacgtgagcctaggcacaaaggtagtcactgaaaaagaacactagcacagcacanagagaaacaacagatttagagattcagcccccntcnntcttctttccttttttttcctttcaantcnttt

SEQ ID NO: 406 - DNA, 777 bp, Zea mays
  source (0)...(0): Zea mays BAC clone full insert sequence contig bacm.pk024.f21.fis10
  misc_feature (1)...(777): n = A,T,C or G
ngagcgctatannnnnnnnnnnnnnnnnnnnnnnnnnnnnnnnnnnnnnnnnnnnnnnnnnnnnnnnnnnnnnnnnntggcgtggtttcgcgtaatttcgttgtcgtacgtcacacattcccaaaacgggtgtcggggtgcatacaaagcacgagtttttgccaccggaaccaattcttcgtttttcacaacgaacattcccaatcctctactttaggtccaaaactcatgtttggggtggtttcgcgctatatcgttgccgcccgtcacccattccgaaaacgggtgtcagggtgcatacaatgcacgagtttttgccaccggaaccatttcttcgtttttcgcaacgaacatgcccaatccactactttaggtccaaaactcatatttggggtggtttcgcgcaatttcgtagccgcacgtcacccattccgaaaatgggtgtcgggtgcatacaaagtatgagttttcgccgccggaaccaattcttcgtttttcgctacgaacatgcccagtccactactttaggtaaaaactcatattttggggtggtttcgcgcaatttcgttgcgagacgtcacacattccaaaaacgggtgtcggggtgcatacaaagcacgactttttgccaccgaaccatttcttcgtttttcgcacgaacattctcatcctctactttaggtcaaaactcatgtttggggtgggttcgcgctatatcgttgccgcccgtcacccattccgaaaaacggtgtcaagggtgctacaaaggcacaagtt

SEQ ID NO: 407 - DNA, 1050 bp, Zea mays
  source (0)...(0): Zea mays BAC clone full insert sequence contig bacm.pk024.f21.fis11
gtcccttcgaatgtgcccaaatcctttgcattggaggcattggatgtcctttgttcttcccgtggaagcaatagaagatatttggctacagcttgggaggatcctttccctgtctcaatagcacgagaaggtgctgatttcgatggtgttgtggatgatctattggaagcatctccctgaaacacatggttagagctagcagcactagtgcggggctgccaagatgtattgcgacctgcataagtgttagttctcaagcatcgtccctggacttctctttcagccttacaagcaagatgaaataagcgagtaacattagtgtattccttgtaagctaatatatcctgaatttctcttgtcaaaccacccatgaacctagccattgcagcttcttcattttctacgagaccacacctcaacatgcctatttgtaattgttgataatactcttcaacagatttgttgccttgtctaagctgttgtaatttatgtaataaatcacgagcatgataggaaggaacaaaacgactacgcatgattctttttaaagcattccaagtttgtggtatggtagctagatgtgtagtttggtactcatgccaccaaatagaagcaaaatcagtgaattcactcgtagcagctctaacctttttatcatcagaaaaatcatagcatgcaaatttttgatctaccgacaattcccatgttagatatgcatcaggatcatattttccatcaaacgatggtatggagaatttaattcttcctagagaatcatcattttcatgtacctcacgtcgtggaggtcgaccacccaagccatggcgatcacgtcgttggtgtcgtcggtgcctaatagatcggtcatcacgctcggtgtctgctgaatactccgtagcatcatctcttgcggtaccagcaatggaaccatagccatcatcatcaccttgttgcctactttcacgcccaacttggtccatcctatctaagcgctcaataattgctgcaagagaggtgttagtagcagcaactgtttgttccaaagtggtc

SEQ ID NO: 408 - DNA, 668 bp, Zea mays
  source (0)...(0): Zea mays BAC clone full insert sequence contig bacm.pk024.f21.fis12
gacagggtactaaaagtgtagaagaatattatcaggaattacaaatgggtatgctgcgttgtaacatagaggagggtgaggaatctgctatggctagatttttgggcgggttaaatagggaaattcaggacatccttgcttataaagattatgctaatgtaacccgattgtttcatcttgcttgcaaagctgaaagggaagtgcagggacgacgtgctagtgcaaggtctaatgtttctgcaggaaaatctacaccatggcaacagcgcacgactacgtccatgaccggtcgtacactagcaccaactccctcgccaagtcgaccagcacccccgccttcctccggcgacaaaccacgtgcatcttccacaaattcagcaaccaaatctgcccagaaaccagcaggtagtgcctcttcagtagcctccacgggtagaacaagagatgttctgtgttatcgatgcaagggctatggacacgtgcagcgtgattgtcctaatcagcgtgttttggtggtaaaagacgatggtggggtatcctctgctagtgatttggatgaagctacacttgctttgcttgcggctgatgatgcaggcactaaggaaacacccgaagaacagattggtgcagatgatgcaagcattatgagagctccttggtacgcgtgt

SEQ ID NO: 409 - DNA, 711 bp, Zea mays
  source (0)...(0): Zea mays BAC clone full insert sequence contig bacm.pk024.f21.fis13
  misc_feature (1)...(711): n = A,T,C or G
catgaccggccgtacactagcaccaactccctcgccaagtcgaccagcacccccgccttcctccagcgacaaaccacgtgcatcttccacaaattcagcaaccaaatctgcccagaaacccgcaggtagtgcctcttcagtagcttccacaggtagaacaagagatgttctgtgttatcgatgcaagggctatggacacgtgcagcgtgattgtcctaatcagcgtgttttggtggtaaaagacgatggtgggtattcctctgctagtgatttggatgaagctacacttgctttgcttgcggctgatgatgtaggcactaaggaaccacccgaagaacagattggtgcagatgatgcagagcattatgagagcctcattgtacagcgtgtgcttagtgcacaaatggagaaggcagagcagaatcagcgacatacgttgtttcaaacaaagtgtgtcattaaggagcgttcatgtcgtttgatcattgatggaggtagctgcaacaacttggctagcagcgacatggtggagaagcttgcacttacgaccaaaccgcacccgcatccatatcacattcaatggctcaacaatagtggtaaggtcaaggtaaccaagctggtacgaattaattttgctattgggtcatatcgtgatgtttgtgactgtgatgttgtgcctatggatgcnttgtatattctgctaggtagacc

SEQ ID NO: 410 - DNA, 602 bp, Zea mays
  source (0)...(0): Zea mays BAC clone full insert sequence contig bacm.pk024.f21.fis14
gcgcattctcaggaaattcatggcatgcaaacttttgatcaaccgcaatctcccaagtaatgtaagcatcagggtcatatttaccatcaaaaggaggtattttaaatttaaccttactaaaagcatcatcattaccatgtacctcacgtcggtgaaaaccacccatacctctacggttagtacgtagtcgccggcgattaggtgcttcttggtcatcttgttcagtatcagcaacatagtcatcccagttaccttcggcgccctcatcacgcccaccattgatattagcatgcatctcatcaaaccgcctcaagagtgcgacaaggctcttgtcaatatgagcaactgtcatttccacatttgcaagtttggtgttcgtgtcgatctgtgtggcctccaattgccccatcttttcattcgtcacctgcatgtcattatcaagaccttccgtgtgcgtcttcactagccttacaaagtgttgtatgatacccttggtgcgaggagagtgtggcatattacgagaagcatcatcaacctccaatcctgccatggttagacgaaatcaagcggaaaataccgtcgacctcgacgccggtgttgat

SEQ ID NO: 411 - DNA, 1373 bp, Zea mays
  source (0)...(0): Zea mays BAC clone full insert sequence contig bacm.pk024.f21.fis15
caaaacaccaaaaggagacccaacgacaaaaacaggggtgtactgctcacaaggcgctcacactagtgctgttatcaagttcttatccgttcttaccaagccacagtggtgaactgcaatcaacaggtggaaccggtgaaagattggatgagcgattgcgtggagaaacagaaacctgctcgtcgtagaaatatgtggagttgtgggaaggctgcactcaagtcaaggattagcacgatcaaacaataatgcaaagttgaattatagtgcaaaacacgaaactatattgctggccacaggtgcaaaggatggatggaactagcagaatggcagtaccgtaaatattgtactagtgatgccaaaaaggcactagtagaaatcacaggtgatgttgtttttctttttttgtatgatttttttgatatttttctcagcacaagaagcaacaagataggagctacacgaagtttcacctaaaacagatatcagatgtggtcgatagaaaatcaggaagttctctgaaaagcgtgcgagaactttgacggatttttttctttattttcctgaatttttttgacaattttgtcgaaccccaaacagaccgtaggtgagtttggccggcctcagaaagatgtcaactagctcctgtaaaaatttcaaattttttggacacccgagcgaaaagttatgcccggtttacggaaggttcctcaagttatgttgtaaaaacgaccgggatgaaacaaacgtatcctttctccttcgttttctttttttgtatctgtttttttatgtacccgaaggagaaaaacaaggaaacggccgttgactcggtttgtttttctgtttttttttgacgtaaccgaaggagaaaaacaaggaaacgatgttgacttagtttgtggcgtgatcaaaggggagatggtggcggtgctagggtttgaatggtggaagaacacaatgcaaccagcaacaaataacgcgaaagcacacaaattcaacaatgcagattattgaaagaaagtgcgaggctcaaaaaggtgttgggataaggtctaacctaaatttttatgtggttttgtggactgtaggaaaaaaaacactcgataaactcaccgatcaacctggaaatctgataccaattgatgtagctgaggtgcccgatctttcggcgagtagagataattccgatttggcggaagatgacccttgcgatccgactacgacgagcaagcccgaggcgccaatgcaatcgctgaaccaactccctgtggttaccgaccttgctgatgcgagatcggcctgatcacgaagatcgtttcctgtgtgcaatcgaagaacgaacaagaacaagatgcgagcaacctaatcta

SEQ ID NO: 412 - DNA, 1039 bp, Zea mays
  source (0)...(0): Zea mays BAC clone full insert sequence contig bacm.pk024.f21.fis16
  misc_feature (1)...(1039): n = A,T,C or G
cgtggtgtggatccgaatcatagtcatatctgttctgaggccgtcgtaatcattgttttcttaccgagacatttcctgccttttctgcccatggtgctgcgtcaccctattttggcccaatgggtcgtgtatcaagttaggtctattagggacgcatcctagggttgcagcacgaccccaatacccttgtggtcgtcctcccatgtttataaaccccctagccgccaccaagaacagcgggttttgtttagatcaagtttagctctcgctacttgcttgcaagcgcgcgtgctagttcagccgcccgtcttcttgtcttcggaaccccaccatattgtagtttgatctttaaacctacatttagatctggtaattcagtacttgttctacttgttcttgctagttcttcgattgcttgcaggacgagtgccctagtggccagggtgtcacgctccacaagatcgtgacagccataggaggtggtgtatcggttgctaaggcgcagcgtctttggaaggctgtagtcgggccgtgaacgtcgtctcctcccccaatcgagttattccacaccctctcatcgaaagatcgggcaatcacccaacgggtgcacatcagttggtaatcagagcaaggtttatcggtgagagatttacttttcttcgctgttttcttatctcctatagtccagaaaaagccaaaaaatagtagattagttttaccgcaatcctataaaccattgagcatttactagtactacttagttagggcttgttgagtttttggttgcatcggttgtgtcgagttgctggtcttagtttattcctttagagttttgagttctaccacgttttggtcaccacgaaatccaccatcaccaaaaacatctctggttcgtttttgccaccacggatacatatcatatccgatttggaagttaaatacaatctggaaagcttatcttatcttctttccnacggatctgaccttatctcaaaattcgttctgagcgctccgcaatcatcgtagagattctggactt

SEQ ID NO: 413 - DNA, 800 bp, Zea mays
  source (0)...(0): Zea mays BAC clone full insert sequence contig bacm.pk024.f21.fis17
  misc_feature (1)...(800): n = A,T,C or G
gccctacttgggagaggaagttgagcttgagtcgaggacgactcaaatgcaagaaggggagaatgatgaagacatccacactactgatacatctatgccaatacaagtaccaatttctggtcccattactcgcgctcgtgcttgtcaactccaccatcaggtgattacactcttgaatgcatgtccatcatatttagaccatggagacccgtgcactcttgttttgcttaggaaccagggagaagaccgaaagggaaaaagatttgaacatgctggattcggactgcagaagaacaccaacttgtgacggtcaccacggtcacatgcaggctcggattggaatgttcaagcacaacatggaaagcctatcaagtcgactttcatatggatccggaattatagtcatatcttttctgaggccgccgtaatcattgtttccttactgagacatttcctgccttttctacaaatggtgctgcgtgaccctattttggcccaatgggtcgtgtatcaagttgggtccattagggacgcatcctagggttgcagcacgaccccaatacccttgtggtcgtcctcccatgtttataaaccccctagccgccaccaagaacagcgggttttgtttatatcaagtttagctctcgctacttgcttgtaagcgcgcgtgctggttcagcccgcccgtcttcttgtcttcggaactgatgaagacttccacactactgatgcatctataccaatacaagtaccaatttctggtcccattaactcgnggctcgtgctcgtcaactcaacaa

SEQ ID NO: 414 - DNA, 727 bp, Zea mays
  source (0)...(0): Zea mays BAC clone full insert sequence contig bacm.pk024.f21.fis18
tgaatgtgatatggatgcgggtgcggtttggtcgtaagtgcaagcttctccaccatgtcgctgctagccaagttgttgcagctacctccatcaatgatcaaacgacatgaacgctccttaatgacacactttgtttgaaacaacgtatgtcgctaattctgctctgccttctccatttgtgcactaagcacacgctgtacaatgaggctctcataatgctctgcatcatctgcaccaatctgttcttcgggtggttccttagtgcctgcatcatcagccgcaagcaaagcaagtgtagcttcatccaaatcactagcagaggaatacccaccatcgtcttttaccaccaaaacatgctgattaggacaatcacgctgcacgtgtccatagcccttgcatcgataacacaaaacatctattgttctacccgtggaggctactgaagaggcactacctgctggtttctgggcagatttggttgctgaatttgtggaagatgcacgtggtttgtcgtcggaggaaggcgggggtgctggtcgacttggcgagggagttggtgctggtgtacggccggtcatggacgtagtcgtgcgctgttgccatggtgtagattttcctgcagaaacattagaccttgcactagcacgtcgtccctgcacttccctttcagctttgcaagcaagatgaaacaatcgggttacattagcataatctttataagcaagga

SEQ ID NO: 415 - DNA, 1194 bp, Zea mays
  source (0)...(0): Zea mays BAC clone full insert sequence contig bacm.pk024.f21.fis19
tggttccggtggcaaaaactcgtgctttgtatgcaccctgacacacgttttggaaatgggtgacgtacgacaacgaaattgcgcgaaaccaccccacacatgagttttggacataaagtactggattgggcatgttcgttgcgaataacaaagaaatggttccggtggcgaaaactcatgctttgtatgcacccgacacccgttttcggaatgggtgacgtgctgcaatgatatagcgcgaaaccaccccaaacatgagttttggacctaaagtagaggattgggcatgttcgttgcgaaaaaagaagaattggttccggtagcaaaaactcgtgctttgtatgcaccccgacacccgttttggaaatgtgtgacgtgcggcaacgaaattgcgcggaaccaccccaaacatgagttttggacctaaagtagtggattgggcatgttcgttgcaaaaaacgaagaaatggttcctgggtggcgaaaactcgtgcttttgttgccccccgacacccgttttcggaatgggtgacgtgcggcaacgaaattgcgcgaaaccaccccaaacatgagttttggacctaaagtagtggattgggcatgctcgttgcaaaaaacgaagaaatggttccggtggcaaaaactcgtgctttgtatgcacctcgacacccgttttcggaatgggtgacgtgcggcaacgaaattgcgcaaaaccaccccaaacataagttttggacctaaagtagtggattgggcatgttcgttgcgaaaaacgaagaaatggttccggtggcaaaaactcgtgctttgtatgcaccccgacacccgttttcgaaatgggtgacgtgcgtcaccgaaatagcgcgaaacaaccccaaacatgagttttggacctaaagtagaggattgggcatgttcgttgcgaaaaacgaagaattggttccggtggcaaaaactcgtgcttggtatgcacctcgacacccgtttcggaaatgggtaacgtccggcacgaaaattgggcgaaaccaccccacacttgagtttttggacctaaagtagtggatttggccatggtcctttccaaaaaacaaagaaatggttcgggtggcgaacacccgggctttgtatgcacccgacactgcttttcggaattgggtaaggtgcgggaaccaaatttcggggaacaacccaaaa

SEQ ID NO: 416 - DNA, 844 bp, Zea mays
  source (0)...(0): Zea mays BAC clone full insert sequence contig bacm.pk024.f21.fis20
tgctgagaaaaatatcaaaaaatcatacaaaaaaagaaaaacaaaatcaccctgtgatttctactagtgcctttttggcatcactagtacaatatttacgttactgccattctgctagttccatccatcctttgcacctgtggccagcaatatagtttcgttttttgcactataattcaactttgcattattgtttgatcgtgctaatccttgacttgagtgcagcctacccacaacttcacatatttctacgacgagcaggtttctgtttctccacgcaatcgctcatccaatctttcaccggttccacctgttgattgcagttcaccactgtggcttggtaagaacggataagaacttgataacagcactagtgtgagcgccttgtgagcagtacacccctgtttttgtcgttggtttttttctccttttggtgttttggtgtttgcactaactatggcaggagcacacgacatggtggatgcccagttgcaggaagtaaggggacaagttgatggacttgctgctgacattaggacgatgcatgaacggcttgattcaacgatcacttcgtcgaccgagcgtttcaaccaacttgaccttgctcaaacggcgactcgcaccacactcgacaccatcctggcacgccttgatgccttgaccacaaagatggagcaggaatacggcggtgacactgagcaggacgatggagatcgccgtggtcgtgcacgtcgtgtggttcgtcatccccctaatgacttattttctaagattaatttaaaattccatcttttaatggtaaatatgatcctgctgcatatcttgattgggaatttagagtaga

SEQ ID NO: 417 - DNA, 1594 bp, Zea mays
  source (0)...(0): Zea mays BAC clone full insert sequence contig bacm.pk024.f21.fis21
  misc_feature (1)...(1594): n = A,T,C or G
ctacggttagtacgtagtcgccggcgattaggtgcttcttggtcatcttgttcagtatcagcaacatagtcatcccagttaccttcggcgccctcatcacgcccaccattgatattagcatgcatctcatcaaaccgcctcaagagtgcgacaaggctcttgtcaatatgagcaactgtcatttccacatttgcaagtttggtgtttgtgtcgatctgtgtggcctccaattgccccatcttttcattcgtcacctgcatgtcattatcaagaccttccgtgtgcgtcttcaccagccttacaaagtgttgtatgatacccttggtgcgaggagagtgtggcatattacgagaagcatcatcaacctccaatcctgccatggttagacgaacagaggcaacaagaaaaaaaacgtgaaggaatgaaaactctacaactattaggatgtagctactgcaaggcgctcactctcaacctgccacacaagctcttaccaattcttaccttgcacaacaggaggggtcagcaaccaacaagtctgcaaccgtagaataagtgtatcggtgccgcagcaacacgacctgtcaaactgtagtcgaaatatgtagagttgtaggtgggctgaagcaaggaatacactagtaccacgttagttacaaaagcaagctgaataatcgttcaacggtggtactgtgctggtcctaggctaaaccaggctagagacgtgagcctaggcacaaaggtagtcactgaaaaagaacaactagcacagcacaaagagaaacaacagatttagagattcagcccccttcttcttcttttcccttttttttcttttctattcttttttttttcttcttctgtttttttttgcagggacctaaacccttttttttcactatgacaacccaaacaataaagatattgctaacagcccctttaaatcagatttaacaaatcttgttaatatagaaagtccagaaatctctacgatgattgcggagcgctcagaacgaattttgagataaggtcagatccgttggaaagaagataagataagctttccagattgtatttaaacttccaaatcggacatgagatgtatccgtggtggcaaaaacgaaccagagatgtttatggtgatggtggatctcgtggtgaccaaaacgtggtagaactcaaaactctaaaggaataaactaagaccagcaactcgacacaaccgatgcaaccaaaaactcaacaagccctagctaagtagtactagtaaatgctcaatggtttataggattgcggtaaaactaatctactatttttggctttttctggactataggagataaganaacagcgaagaaaagtaaatctctcaccgataaaccttgctctgattaccaactgatgtgcacccgttgggtgattgcccgatctttcgatgagagggtgtggaataactcgattggnnggaggaacgacgttcacggcccgactacagccttccaaagacgctgcgccttagcaacgatacaccacctcctatggctgtcacgatcnttgtggagcgtgacaccctgggcactagggcactcgtcct

SEQ ID NO: 418 - DNA, 1688 bp, Zea mays
  source (0)...(0): Zea mays BAC Clone full insert sequence contig bacm.pk024.f21.fis22
cttaaatcaccagcgcgaggtcgacggtatcgatttctttgatagcgccaggtgcagacgctgcttgataagggttacattcgtgagtctcttagcccttgctcggtccctgttttactcgttccaaagaaagatgggtcatggcgtatgtgcgtagattgtcgtgctattaataacatcacagttcgttatcgatatcctattccacgccttgatgatatgctagatgagcttagtggtgccgttattttctctaaggttgatttgcgtagcggttaccatcagattagaatgaaactcggtgatgaatggaaaacggcttttaaaacgaaatttggtttatatgaatggttggttatgccatttggattgactaatgctcccagcacctttatgcgtttaatgaacgaagttctacgggccttcataggtttatttgttgttgtttatttcgatgatatccttatttacagcaagtctatagaggagcatttagaacatttgcgtgctgtttttgatgctttgcgtgctgcccgcttgtttggtaacatggaaaagtgcacattttgcacgcaatgtgtctcgtttcttggttatgtggttactccgcagggcattgaggtggatagcagcaagattgctgccattcgggagtggcctacaccgacgacggtcacacaaattcggagctttcttggacttgccggtttctaccgcagatttgttcgtgattttagctccattgcagcgcctctacatgagcttacaaagaaagatgtgtcgtttgcttggagtgattcgcaggaggtagcgttcagcactttgaaagataagttaacccaagctcccctcttgcaattgcctgattttaataaagtttttgagcttgaatgcgatgctagcggtattgggctaggtgctgttttgttacaagaaggaaaaccagttgcttattttagtgaaaaattaagcggtgctagtctgaaatattctacttatgataaggagctttacgctttagtgcgcactttgcatacatggcaacactatctttggcatcgtgagttcataattcattctgatcatgaggctttaaaacatattcgtacccaaacaaatctgaaccgtcgtcatgctaaatgggtcgaattcattgagtcctttccttacattattaaacacaagaacgggaaggacaatgttattgctgatgctttgtctcgtcgctataccatgctgtcacaattagattttaaaatctttggtttggacactctgaaggatcaatatgttgacgatgctgattttaaagatgctttcggccattgtattaatgggataccatggggcaaatttcacatacaggatgggttcctgtttcgcgctaacaagctgtgtgttccagctagttcggttcgtcttttgttgttacaggaggcacatggaggcggtctcatggggcattttggcgtctacaaaacacatgaggtgttggctgcccacttcttttggcctcggatgcgcgctgatgttgagcgccttattgcacgctgcactacttgtcagaaagctaagtcacggttgaacaaccatggtttgtatatgcctttgcctgtcccttcttctccttggcttgatatctctatggactttgttttgggcttgcctagaactaagaaggggaggga

SEQ ID NO: 419 - DNA, 1628 bp, Zea mays
  source (0)...(0): Zea mays BAC clone full insert sequence contig bacm.pk024.f21.fis23
gcattaaaaacagcacgcatgtgatcaacatgttcatccatagatttgctgtagatcaatatgtcatcaaagtatactaccacaaattttccaatgaaggcacacaaaacctcgttcattaatctcatgaaagtgctaggtgcattactgaacccaaaaggcatgactaaccactcatacaatccgaacttagttttgaaagcagttttccattcatctcccaatttcatacgaatctggtggtacccactacgcaaatcaactttagaaaagacgatggcaccactcaattcatcaagcatatcatctaaacgtggaatagggtgtcaataccgtatcgtgatattattaatagccctacaatcaacacacatacgccatgttccatcttttttaggcactaaaataaccggaacagcacacggactaagagactcacgcacgtaacctttgtcgagtagttcttgaacttgtcgctgaatttcttttgtttcctccagatttgtcctatatggagcacgatttggcaaagatgctgatagagttggagtgcccgatctttcggtgagtggagataattccgatctggtggaagtagaccctcacgatccgactacgacgagcgaacccgaagcgccaatgcaatcgctgaaccaactcccaatggttactgaccttgctgctgcgagatcggcctgatcacgaagatcgtttcctgtgcgcaatcgaagaacgaacaagaaaaagatgcgagcaatctttgatgtgcacccgttgggtgattgcccgatctttcgatgagagggtgtggaataactcgattgggggaggagacgacgttcacggcccgactacagccttccaaagacgctgcgccttagcaaccgatacaccacctcctatggctgtcacgatcttgtggagcgtgacaccctggccactagggcactcgtcctgcaagcaatcgaagaactagcaagaacaagtagaacaagtactgaattaccagatctaaatgtaggtttaaagatcaaactacaatatggtggggttccgaagacaagaagacgggtggctgaactagcacgcgcgcttgcaagcaagtagcgagagctaaacttgatctaaacaaaacccgctgttcttggtggcggctagggggtttataaacatgggaggacgaccacaagggtattggggtcgtgctgcaaccctaggatgcgtccctaatagacctaacttgatacacgacccattgggccaaaatagggtgacgcagcaccatgggcagaaaaggcaggaaatgtctcggtaagaaaacaatgattacggcggcctcagaacagatatgactataattccggatccatatgaaagtagacttgataagctttccatgttgtgcttgaacattccaatccgagcccgcatctgaccgtggtgaccgtcacaagttggtgttcttctgcagtccgaatccagcatgttcaaatccttttccctttcggtcttctccctgattcctaagcaaaacaagagtgcacgggtctccatggtctaaatatgatggacatgaactcaagagtgtaatcacctgatggttgagttgacgagcacgagcgcgagta

SEQ ID NO: 420 - DNA, 811 bp, Zea mays
  source (0)...(0): Zea mays BAC clone full insert sequence contig bacm.pk024.f21.fis24
gggggctgatctctaatctgtgtttctcttgtgctgtgctagtgttcttttcagtgactactttgtcctaggctcacgtctctagcctggtttagcctaggaccagcacagtaccaccgttgaacgattattcagcttgcttttgtaactaacgtggtactagtgtattccttgcttcagcccacctacaactctacatatttcgactacagtttgacaggtcgtgttgctgcggcaccgatacacttattccacggttgcagacttgttggttgctgacccctcctgttgtgcaaggtaagaattggtaagagcttgtgtggcaggttgagagtgagcgccttgcagtagctacatcctaatagttgtagagtttttattccttcacgtttttttttcttgttgcctctgttcgtctaaccatggcaggattggaggttgatgatgcttctcgtaatatgccacactctcctcgcaccaagggtatcatacaacactttgtaaggctagtgaagacgcacacggaaggtcttgataatgacatgcaggtgacgaatgaaaagatggggcaattggaggccacacagatcgacacgaacaccaaacttgcaaatgtggaaatgacagttgctcatattgacaagagccttgtcgcactctttgaggcggtttgatgagatgcatgctaatatcaatggtgggcgtgatgagggcgccgaaggtaactgggatgactatgttgctgatactgaacaagatgaccaagaagcacctaatcgccggcgactacgtactaaccgtagaggtatgg

SEQ ID NO: 421 - DNA, 1534 bp, Zea mays
  source (0)...(0): Zea mays BAC clone full insert sequence contig bacm.pk024.f21.fis25
ttggcatcactagtacaatatttacggtactgccattctgctagttccatccatcctttgcacctgtgcccagcaatatagtttcgtgttttgcactataattcaactttgcattattgtttgatcgtgctaatccttgacttgagtgcagcctacccacaactccacatatttctacgacgagccggtttctgtttctccacgcaatcgctcaaacaatctttcaccggttccacctgttgattgcagttcaccactgtggcttggtaagaacagataagaactttttgtcgttggtttttatccttttggtgtttgcgctaactatggcaggagcacacgacatggtggatgcccagttgaaggaagtaaggggacaagttgatggacttgctgctgacattaggacgatgcatgaacggcttgattcaacgatcacttcgacgaccgagcgtttcaaccaacttgaccttgctcaaacggcgactcgcaccacactcgacaccatcctggcacgccttgatgcattgaccacaaagatggagcaggaatacggcggtgacactgacaggacgatggagatcgccgtggtcgtgcacgtcgtgtggttcgtcatccccctaatgacttattttctaagattaaatttaaaattccatcttttaatggtaaatatgatcctgctgcataacttgattgggaattagaggtagaacagaaattttcatgccatgatattcctgctaatagccaagtgaacgctgccattagtgaatttactgattttgctttaatttggtggcgtgagtataaacaaaaacttcccattaacagtgtcattacttggacccaattaaaaactgccatgcgccacagatttgttccttcctattatgctcgtgatttgcttaacaaaatgcagcgttttcaacaaggttcacaatttgttgaggaatattaccaggagttgcaaaagggtatgcttcgttgtggtttggttgagtcagatgacgctgctatggcgcgttttcgtggtggtttgaatagggaaattcagggtatacttgattataaggattattttgatataaccacattgtttgaatatgcttgcaaagctgaacgtgaagtgcagggacgacgatcaaagacatatactaactcttttgcaggccggggtccaacacacagctcaactccttccagccctgcacctcctacgcctagcactacatcgcacacagggacgaccaagccagtggcgccccctgccaaaggcgccgcttcttccacaggacgtacacgggatattcagtgccatcgttgcagagggattgggcacatgattcgggactgcccaaacaagcgtaccttgcttatacgtgacaatggtgagtactcttcagccagtgattctgaggaaactagtcatgctatgattgccactaaccatgcagaaaatgaggaagtccacgttgatcccatcgacgccgataggtatgagagtcttggtgtgcagcgtgttctcagcacc

SEQ ID NO: 422 - DNA, 974 bp, Zea mays
  source (0)...(0): Zea mays BAC clone full insert sequence contig bacm.pk024.f21.fis26
ggtccaaaactcatgtttagggtggtttcgcgcaatttcgttgccgcacgtcacccattccgaaaacgggtgttggggtgcatacaaagcacgagttttcgccaccggaaccatttcttcgttttttgcaacgaacatgcccaatccactactttaggtccaaaactcatgtttggggtggttccgcgcaatttcgttgccgcacgtcacacatttccaaaacgggtgtcggggtgcatacaaagcacgagtttttgctaccggaaccaattcttcttttttcgcaacgaacatgcccaatcctctactttaggtccaaaactcatgtttggggtggtttcgcgctatatcattgcagcacgtcacccattccgaaaacgggtgtcgggtgcatacaaagcatgagttttcgccaccggaaccatttctttgttattcgcaacgaacatgcccaatccagtactttatgtccaaaactcatgtgtggggtggtttcgcgcaatttcgttgtcgtacgtcacccatttccaaaacgtgtgtcggggtgcatacaaagcacgagtttttgccaccggaaccaattcttcattttttgcaacgaacatgcccaatcctctactttaggtccaaaactcatgtttggggtggtttcgcgctatatcattgccgcacgtcacccattccggaaacgggtgtcgagtgcatacaaagcatgagttttcgccaccggaaccatttctttgttattcgcaatgaacatgcccaatccactactttatgtccaaaactcatgtgtggggtggtttcgcgcaatttcattgtcgtacgtcacccatttccaaaacgggtgtcggggtgcatacaaagcacgagtttttgccaccggaaccaattcttcgtttttcgcaacgaacatgtccaatcctctactttaggtccaaaactcatgtttggggttgtttcgcgctatatca

SEQ ID NO: 423 - DNA, 868 bp, Zea mays
  source (0)...(0): Zea mays BAC clone full insert sequence contig bacm.pk024.f21.fis27
tgtatgcaccttgacacccgttttcggaatgggtgacgggcggcaacgatatagcgcgaaaccaccccaaacatgagttttggacctaaagtagaggattgagaatgttcgttgcgaaaaacgaagaaatggttccggtgccaaaaagtcgtgctttgtatgcaccccgacacccgtttttggaatgtgtgacgtctcgcaacgaaattgcgcgaaaccaccccaaatatgagtttttacctaaagtagtggactgggcatgttcgtagcgaaaaacgaagaattggttccggcggcgaaaactcatactttgtatgcacccgacacccattttcggaatgggtgacgtgcggctacgaaattgcgcgaaaccaccccaaatatgagttttggacctaaagtagtggattgggcatgttcgttgcgaaaaacgaagaaatggttccggtggcaaaaactcgtgcattgtatgcaccctgacacccgttttcggaatgggtgacgggcggcaacgatatagcgcgaaaccaccccaaacatgagttttggacctaaagtagaggattgggaatgttcgttgtgaaaaacgaagaattggttccggtggcaaaaactcgtgctttgtatgcaccccgacacccgttttgggaatgtgtgacgtacgacaacgaaattacgcgaaaccacgccaaacatgagttttggacataaagtagtggattgggcatgttcgttgcgaaaaacgaagaaatggttccggtggcgaaaactcatgctttgtatgcacccgacacccgttttcggaatgggtgacgtgcgacaatgatatagcgcgaaaccaccccaaacatgagttttggacctaaag

SEQ ID NO: 424 - DNA, 1470 bp, Zea mays
  source (0)...(0): Zea mays BAC Clone full insert sequence contig bacm.pk024.f21.fis28
ttttgggaatgggtgacgtacggcaacgaaattgcgcgaaaccaccccaaacatgagttgtggacctaaagtagtggattgggcatgctcgttgcaaaaatcgaagaaatggttccggtggcgaaaactcgtgctttgcatgcaccccgacacctgttttcggaatgggtgacgtgcggcaacgaaattgcgcgaaagcaccccaaacataagttttggatctaaagtagtggattgggcatgttcgttgcgaaaaacgaagaaatggttccggtggcaaaaactcgtgctttgtatgcaccccgacacccgttttcggaatgggtgacgtgcggcaatgatatagcgcgaaacaaccccaaacatgagttttggacctaaagtagaggattggacatgttcgttgcgaaaaaagaagaattggttcccgtggcaaaaactcgtgctttgtatgcaccccgacacccgttttggaattgggtgacgtacgacaatgaaattgcgcgaaaccaccccacacatgagttttggacataaagtagtggattgggcatgttcattgcgaataacaaagaaatggttccggtggcaaaaactcatgctttgtatgcacccgacacccgttttcggaatgggtgacgtgcggcaatgatatagcgcgaaaccaccccaaacatgagttttggacctaaagtagaggattgggcatgttcgttgcaaaaaaagaagaattggttccggtggcaaaaactcgtgctttgtatgcaccccgacacacgttttggaaatgggtgacgtacgacaacgaaattgcgcgaaaccaccccacacatgagttttggacataaagtactggattgggcatgttcgttgcgaataacaaagaaatggttccggtggcgaaaactcatgctttgtatgcacccgacacccgttttcggaatgggtgacgtgcggcaatgatatagcgcgaaaccaccccaaacatgagttttggacctaaagtagaggattgggcatgttcgttgcgaaaaaagaagaattggttccggtagcaaaaactcgtgctttgtatgcaccccgacacccgttttggaaatgtgtgacgtgcggcaacgaaattgcgcggaaccaccccaaacatgagttttggacctaaagtagtggattgggcatgttcgttgcaaaaaacgaagaaatggttccggtggcgaaaactcgtgctttgtatgcaccccaacacccgttttcggaatgggtgacgtgcggcaacgaaattgcgcgaaacaccctaaacatgagttttggacctaaagtagtggattgggcatgttcgttgcaaaaacaaaataatggttccggtggcaaaaactcgtgctttatgccccccgaacaccgttttcggaaaaggtgaagtgcagcaacccaatatcgccggaccacccccaacagggatcttggaaccaaaga

SEQ ID NO: 425 - DNA, 1672 bp, Zea mays
  source (0)...(0): Zea mays BAC clone full insert sequence contig bacm.pk024.f21.fis29
  misc_feature (1)...(1672): n = A,T,C or G
tggtgatatggtttggttgcatttgagaaaggatcgttttcctactntgcgccgttctaaattgatgcctcgtgctgctggtccttttaaggtactaaccaagattaatgataatgcttatatccttgacctgcctgcggagtttggtgtttccactagttttaatgttgcagatttgaaaccgtatgcgggagaagatgaggagttgccgtcgaggacgacttcagttcaagaaggggaggatgatgcggacatcaacaccaacacgagcacatctacaccagcagcaccttctccagcccaggcgccaccacttccacctgggccagtgactcgggcccgtgcaagagaattgaactacatcatgttgttaaagaacgaaggcccggaagaatagacgaccagcccaattgcggcccataatggacgacctagggttggccgcccctaggggctgcgccccctctctatttattcaggagctgcgcctcctttatttcccgagttttgttttacgttagccttagctactctcgaacacgcgctaatctgtgctgtctttgtgtattcagaactccaccctcgagtaatagattaggttgctcgcatcttgttcttgttcgttcttcgattgcgcacaggaaacgatcttcgtgatcaggccgatctcgcatcagcaaggtcggtaaccacagggagttggttcagcgattgcattggcgcctcgggcttgctcgtcgtagtcggatcgcaagggtcatcttccgccaaatcggaattatctctactcgccgaaagatcgggcacctcagctacatcccattccgaaaacagctgtcgggtgcatacaaagcatgagttttcgtcaccggaaccatttcttcgttttccgcaacgaacatgcccaatccactactttaggtctaaaactcatgtttggggtggtttcgcgcaatttcgttgccgtacgtcacccattcccaaaacgggtgtcggggtgcatacaaagcaggagtttttgccaccggaaccaattcttcgtttttcgcaacgaacattcccaatcctctactttaggtccaaaactcatgtttggggtggtttcgcgctatatcattgtcgcacgtcacccattccgaaaacgggtgtcgggtgcatacaaagcatgagttttcgccaccggaaccatttcttcgtttttcgcaacgaacatgcccaatccactactttatgtccaaaactcatgtttggcgtggtttcgcgtaatttcgttgtcgtacgtcacacattcccaaaacgggtgtcggggtgcatacaaagcacgagtttttgccaccggaaccaattcttcgtttttcacaacgaacattcccaatcctctactttaggtccaaaactcatgtttggggtggtttcgcgctatatcgttgccgcccgtcacccattccgaaaacggttgtcagggtgcatacaatgcacgagtttttgccaccggaaccatttcttcgtttttcgcaacgaacatgcccnaatccactacttttaggcccaaaactcatattttggggggggttcgcgcattttcttagccggcggtcacccattccgaaaaatggggtgtcgggtgcctaacaagcacgaagttttcgcccccggaacaatttctcctttt

SEQ ID NO: 426 - DNA, 2721 bp, Zea mays
  source (0)...(0): Zea mays BAC clone full insert sequence contig bacm.pk024.f21.fis30
tgctgatgctttgtctcgtcgctataccatgctgtcacagttagattttaaaatctttggtttggacactgtgaaggatcaatatgttgacgatgctgattttaaagatgctttcggccattgtattaatgggaaaccatggggcaaatttcacatacaggatgggttcttgtttcgcgctaacaagctgtgtgttccagctagctcggttcgtcttttgttgttacaggaagcgcatggaggcggtctcatggggcattttggcgtctacaagacacatgaggtgttggctgcccacttcttttggcctcggatgcgcgctgatgtggagcgccttgttgcacgctgcactacttgtcagaaagctaagtcacggttgaacaaccatggtttgtatatgcctttgcctgtcccttcttctccttggcttgatatctctatggactttgttttgggcttgcctagaactaagaaggggagggatagtatttttgtggttgttgatagattctctaaaatggctcactttataccttgtcataaaactgatgatgctagcattgttgctgaattgttctttagagaaattattcgtttacatggtattccaaaaacaatagtctctgatcgcgatggtaagtttctaagccatttttggagatctctttggaataaattgggaactaagttgttgcttagcactacttgtcacccttagactgatggacaaactgaggtagtaaatagaactttatctaccatgcttagggctgttttagacaagaatttgagacgttgggaggattgcttgcctcatgttgaatttgcttacaatcatgccacgcattcttctacaaagatgtgccctttccagattgtttatggttacattcctagggcacctattgatttgatttcacttaatgctgcgaacgccccacatgtagatgcttctgcacatgttgaacaaatgattaccatacatgaacaaacgaaacagaacattgctgctactaatgcaaaaaatcaggttgctggtcgtaaaggaagaaaacatgttacttttgaacctggtgatatgatttggttgcatttgagaaaggatcgttttcctactttgcgccgttctaaattgatgcctcgtgctgctggtccttttaaggtactaaccaagattaatgataatgcttatatccttgacctgcctgcggagtttggtgtttccactagttttaatgttgcagatttgaaaccgtatgcgggagaagatgaggagttgccgtcgaggacgacttcagttcaagaaggggaggatgatgcggacatcaacaccaacacgagcacatctacaccagcagcaccttctccagcccaggcgccaccccttccacctgggccagtgactcgggcccgtgcaagagaattgaactacatcatgttgttaaagaacgaaggcccagaagaatagacgaccagcccaattgcggcccataatggacgacctaaggttggccgcccctaggggctgcgcccccctctctatttattcaggagctgcgcctcctttattttccgagttttgttttacgttagccttagctactctcgaacacgcgcaaatctgcgctgtcttcgtgtattcagaactccaccctcgagtaatagattagattgctcgcctctttttcttgttcgttcttcgattgcgcacaggaaacgatcttcgtgatcaggccgatctcgcaacagcaaggtcggtaaccacagggagttggttcagcgattgcattggcgcctcgggcttgctcgtcgtagtcggatcgcaagggtcatcttctgccaaatcggaattatctctactcgccgaaagatcgggcacctcagcttcatcatagccgccaccaagaacaacgggtttttgtttagatcaagtttagctctcgctacttgcttgtaagcgcgcgtgctagttcagccgcccgtcttcttgtcttcggaaccccacccatattggagtttgattttgaaacctgcatttagatctggtaattcagtacttgttctacttgttcttgctagttcttcgattgcttgcaggacgagtgccctagtggccagggtgtcacgctccacaagatcgtgacagccataggaggtggtgtatcggttgctaaggcgcagcgtctttggaaggctgtagtcgggccgtgaacgtcgtctcctcccccaatcgagttattccacaccctctcatcgaaagatcgggcaatcacccaacgggtgcacatcagttggtatcagagcaaggtttatcggtgagagatttacttttcttcgctgttttcttatctcctatagtccagaaaaagccaaaaaatagtagattagttttaccgcaatcctataaaccattgagcatttactagtactacttagttagggcttgttgagtttttggttgcatcggttgtgtcgagttgctggtcttagtttattcctttagagttttgagttctaccacgttttggtcaccacgagatccaccatcaccaaaaacatctctggttcgtttttgccaccacggatacatatcatatccgatttggagtttaaatacaatctggaaagcttatcttatcttctttccaacggatctgaccttatctcaaaattcgttctgagcgcttcgcaatcatcgtagagaatttctggactttctat

SEQ ID NO: 427 - DNA, 2180 bp, Zea mays
  source (0)...(0): Zea mays BAC clone full insert sequence contig bacm.pk024.f21.fis31
gaccgcgtatagactcactatagggcgaatgggtctaatcacaacgcgcgaggtcgacggtatcttaccaccttgatcccacctacaactctacatatttcgactacagtttgacaggtcgtgttgctgcggcaccgatacacttattccacggttgcagacttgttggttgctgacccctcctgttgtgcaaggtaagaattggtaagagcttgtgaggcaggttgagagtgagcgccttgcagtagctacatcctaatagttgtagagtttttattccttcacattttttttcttgttgcctctgttcatctaaccatggcaggattggaggttgatgatgcttctcgtaatatgccacactctcctcgcaccaagggtatcatacaacactttgtaaggctggtgaaaacgcacacggaaggtcttgataatgacatgcaggtgacgaatgaaaagatggggcaattggaggccacacagatcgacacaaacaccaaacttgcaaatgtggaaatgacagttgctcatattgacaagagccttgtcgcactcttgaggcgatttgatgagatgcatgctaataccaatggtgggcgtgatgagggcgccgaaggtaactgggatgactatgttgctgatactgaacaagatgaccaagaagcacctaatcgccggcgactacgtactaaccgtagaggtatgggtggttttcgccgacgtgaggtacatggtaatgatgatgcttttagtaaggttaaatttaaaatacctccttttgatggtaaatatgaccctgatgcttacattacttgggagattgcggttgatcaaaagtttgcatgccatgaatttcctgagaatgcgcgggttagagctgctactagtgagtttactgaatttgcttctgtttggtggatagaacatggtaagaagaattctaataacatgccacaaacttgggatgcgttgaaacgggtcatgcgggctagatttgttccttcttattatgcacgtgatatgttaaacaagttgcaacaattgagacagggtactaaaagtgtagaagaatattatcaggaattacaaatgggtatgctgcgttgtaacatagaggagggtgaggaatctgctatggctagatttttgggcgggttaaatagggaaattcaggacatccttgcttataaagattatgctaatgtaacccgattgtttcatcttgcttgcaaagctgaaagggaagtgcagggacgacgtgctagtgcaaggtctaatgtttctgcaggaaaatctacaccatggcaacagcgcacgactacgtccatgaccggccgtacaccagcaccaactccctcgccaagtcgaccagcacccccgccttcctccggcgacaaaccacgtgcatcttccacaaattcaacaaccaaatctgcccagaaaccagcaggtagtgcctcttcagtagcctccacgggtagaacaagagatgttctgtgttatcgatgcaagggctatggacacgtgcagcgtgattgtcctaatcagcgtgttttggtggtaaaagacgatggtgggtattcctctgctagtgatttggatgaagctacacttgctttgcttgcggctgatgatgcaggcactaaggaaccacccgaagaacagattggtgcagatgatgcagagcattatgagagcctcattgtacagcgtgtgcttagtgcacaaatggagaaggcagagcagaatcagcgacatacgttgtttcaaacaaagtgtgtcattaaggagcgttcatgtcgtttgatcattgatggaggtagttgcaacaacttggctagcagcgacatggtggagaagcttgcacttacgaccaaaccgcacccacatccatatcacattcaatggctcaacaatagtggtaaggtcaaggtaaccaagctggtacgaattaattttgctattggttcatatcgtgatgttgttgactgtgatgttgtgcctatggatgcttgtaatattctgctaggtagaccatggcaatttgattcagattgtatgcatcatggtagatcaaatcaatattctctcatacaccatgataagaaaattattttgcttcccatgtcccctgaggctattgtgcgtgatgatgttgctaaagctaccaaagctaaaac

SEQ ID NO: 428 - DNA, 1958 bp, Zea mays
  source (0)...(0): Zea mays BAC clone full insert sequence contig bacm.pk024.f21.fis32
gctccgaatttgtgtgaccgtcgtcggtgtaggccactcccgaatggcagcaatcttgctgctatccacctcaatgccctgcggagtaaccacataaccaagaaacgagacacattgcgtgcaaaatgtgcacttttccatgttaccaaacaagcgggcagcacgcaaagcatcaaaaacagcacgcaaatgttctaaatgctcctctatagacttgctgtaaataaggatatcatcgaaataaacaacaacaaacaaacctatgaaggcccgtagaacttcgttcattaaacgcataaaggtgctgggagcattagtcaatccaaatggcataaccaaccattcatataaaccaaatttcgttttaaaagccgttttccattcatcaccgagtttcattctaatctgatggtaaccgctacgcaaatcaaccttagagaaaataacggcaccactaagctcatctagcatatcatcaaggcgtggaataggatatcgataacgaactgtgatgttattaatagcacgacaatctacgcacatacgccatgacccatctttctttggaacgagtaaaacagggaccgagcaagggctaagagactcacgaatgtaacccttatcaagcagcgtctgcacctggcgctggatctccttcgtctcatctggatttgtacggtacggggcgcggttcggaagagaagcgccggggatgagatcgatctgatgctcaatgccacggaggggaggaagacccggtggtaagtccgtaggataaacatcagcatactcctgcaaaaggttaacaacagcagggggtatatccaaagacggtgcatcatcaagcggaacaagcattcgcgagcatacaagtgcataacagggcatatgagcttcatggagatcatcaaaatcagcacgtgtagcaagtaaaacaggagagtgcaacttgatttcagatttaataggtgcggctgatgtcgatttgacttgttgtgcagttttagcagccctagtaagatcatctttcaaaatttggtcaggggtcattggatgtataattattttctggcctttaaacatgaaagaataatgatttgaacgaccatgatgtaaactatcagtatcatattgccaaggtcgacctaataacaaagagcatgcttccataggaataacatcgcaatcagcataatcagaataagaacccagcgaaaaggggacacgtaccgaacgtgttacctttattttaccaccatcattaagccattgaatgtgatacggatgtggatgtgtgcgagtgggcaaggataatttctctaccaacgctgtacttgccaaattgttgcagctgccactatcgatgatgatgcgaatcgaccgttcgtgcacgacgcccttggtatggaatagagtgtgtcgctgatttttttcggcctgggcaacctgtgtgctgagaacacgctgcacaacaagactctcatacctatcggcgtcgatgggatcaacgtggacttcctcattttctgcatggttagtggcaatcatagcatgactagtttcctcagaatcactggctgaagagtactcaccattgtcacgtataagcaaggtacgcttgtttgggcagtcccgaatcatgtgcccaaaccctctgcaacgatggcactgaatatcccgtgtacgtcctgtggaagaagcggcgcctttggcagggggcgccactggcttggtcgtccctgtgcgcgatgtagtgctaggcgtagaaggtgcagggctggaaggagttgagctgtgtgttggaccccggcctgcaaaagagttagtatatgtctttgatcgtcgtccctgcacttcacgttcagctttgcaagcatattcaaacaatgtggttatatcaaaataatccttataatcaagtatatcctgaatttccctgttcaaaccaccacgaaaac

SEQ ID NO: 429 - DNA, 3573 bp, Zea mays
  source (0)...(0): Zea mays BAC clone full insert sequence contig bacm.pk024.f21.fis33
ttgggaatgtttgttgcaaaaatccgaagaattggttccggtggcgaaaactcgtgctttgcatgcaccccgacacccgttttcggaatgggtgacgtgcggcaacgaaattgcgcgaaagcaccccaaacataagttttggatctaaagtagtggattgggcatgttcgttgcgaaaaacgaagaaatggttccggtggcaaaaactcgtgctttgtatgcaccccgacacccgttttcggaatgggtgacgtgcggcaatgatatagcgcgaaacaaccccaaacatgagttttggacctaaagtagaggattgggcatgttcgttgcgaaaaacgaagaattggttccggtggcaaaaactcgtgctttgtatgcaccccgacacccgttttggaaatgggtgacgtacgacaacgaaattgcgcgaaaccaccccacacatgagttttggacataaagtagtggattgggcatgttcattgcgaataacaaagaaatggttccggtggcaaaaactcatgctttgtatgcacccgacacccgttttcggaatgggtgacgtgcggcaatgatatagcgcgaaaccaccccaaacatgagttttggacctaaagtagaggattgggcatgttcgttgcgaaaaaagaagaattggttctggtagcaaaaactcgtgctttgtatgcaccccgaaacccgttttggaaatgtgtgacgtgcggcaacgaaatagcgcggaaccacccaaaacaagagttttggacctaaagtagtggattgggcatgttcgttgcaaaaaaacgaagaaatggttccggtggcgaaaactcgtgctttgtatgcaccccaacacccgttttcggaatgggtgacgtgcggcaacgaaattgcacgaaaccaccccagacatgagttttggacctaaggtagtggattgggcatgttcgttgcgaaaagcgaaaaatggttccggtggcaaaaactcgtgctttgtatgcaccccgacaaccgttttcggaatgggtgacgtgcagcaacgatatagcgcgaaaccaccccaaacatgagttttggacctaaagtagaggattgggaatgtttgttatgaaaaatgaagaattggttccggtggcgaaaactcgtgctttgtatgcaccccaacacccgttttcggaatgggtgacgtgcggcaacgaaattacgcgaaaccaccccaaacatgagttttggacctaaagtagtggattgggcatgttcgttgcgaaaagcgtaaaatggttccggtggcaaaaactcgtgctttgtatgcaccccgacacccgttttggaaatgggtgacgtacgacaacgaaattgcacgaaaccaccccacacatgagttttggacataaagtactggattgggcatgttcgttgcgaataacaaagaaatggtttcggtggcgaaaactcatgctttgtatgcacccgacacccgttttcggaatgggtgacgtgcggcaatgatatagcgcgaaaccaccccaaacatgagttttggacctaaagtagaggattgggcatgttcgttgcgaaaaaagaaggattggttcctgtagcaaaaactcgtgctttgtatgcaccccgacacccgttttggaaatgtgtgacgtgcggcaacgaaattgcgcggaaccaccccaaacatgagttttggacctaaagtagtggattgggcatgttcgttgctaaaaacgaagaaatggttccggtggcgaaaactcgtgctttgtatgcaccccaacacccgttttcggaatgggtgacgtgccgcaacgaaattgcgtgaaaccaccccaaacatgagttttggacctaaagtagtggattgggcatgttcgttgcgaaaagcgaaaaatggttccggtggcaaaaactcgtgcattatgcaccccgacaaccgttttcggaatgcgtgacgtgcagcaacgatatagcgcgaaaccaccccaaacatgagttttggacctaaagtagaggattgggaatgttcgttgcgaaaaacgaagaattggttccggtggcaaaaactcgtgctttgtatgcaccccgacacccgtttttgaaatgggtgacgtacggcaacgaaattgcgcgaaaccactccaaacatgagttgtggacctaaagtagtggattgggcatgctcgttgcaaaaatcgaagaaatggttccggtggcgaaaactcgtgctttgtatgcaccccgacacctgttttcggaatgggtgacgtgcggcaacaaaattgcgcgaaagcaccccaaacataagttttggatctaaactagtggattgggcatgttcgttgcgaaaaacgaagaaatggttccggtggaaaaaactcgtgctttgtatgcaccccgacacccgttttcggaatgggtgacgtgcggcaatgatatagcgcgaaacaaccccaaacatgagttttggacctaaagtagaggattggacatgttcgttgcgaaaaacgaagaattggttccggtggcaaaaactcgtgctttgtatgcaccccgacacccgttttggaaatgggtgacgtacgacaatgaaattgcacgaaaccaccccacacatgagttttggacataaagtagtggattgggcatgttcattgcgaataacaaagaaatggttccggtggcgaaaactcatgctttgtatgcacccgacacccgtttccggaatgggtgacgtgcggcaatgatatagcgcgaaaccaccccaaacatgagttttggacctaaagtagaggattgggcatgttcgttgcgaaaaaagaattggttccggtagcaaaaactcgtgctttgtatgcaccccgacacccgttttggaaatgtgtgacgtgcggcaacgaaattgcgcggaaccaccccaaacatgagttttggacctaaagtagtggattgggcatgttcgttgcaaaaaacgaagaaatggttccggtggcgaaaactcgtgctttgtatgcaccccaacacccgtttttggaatgggtgacgtgcggcaacgaaattacgcgaaaccaccccaaacatgagttttggacctaaagtagtggattgggcatgttcgttgcgaaaagcaagaaatggttccggtggcaaaaactcgtgctttgtatgcaccccgacacccgttttggaaatgggtgacgtacgacaacgaaattgcgcgaaaccaccccacacatgagttttggacataaagtactggattgggcatgttcgttgcgaataacaaagaaatggtttcggtggcgaaaactcatgctttgtatgcacccgacacccgttttcggaatgggtgacgtgcggcaatgatatagcgcgaaaccaccccaaacatgagttttggacctaaagtagaggattgggcatgttcgttgcgaaaaaagaaggattggttcctgtagcaaaaactcgtgctttgtatgcaccccgacacccgttttggaaatgtgtgacgtgcggcaacgaaattgcgcggaaccaccccaaacatgagttttggacctaaagtcg

SEQ ID NO: 430 - DNA, 5369 bp, Zea mays
  source (0)...(0): Zea mays BAC clone full insert sequence contig bacm.pk024.f21.fis34
  misc_feature (1)...(5369): n = A,T,C or G
tgaattgcagcaagaggtctaaactggtgattgaaacaaggtggcgcgaactcgaaactctagcggtaagaaaactttagaccagcaactcgacccaaatgcagcaaccgtgaattcaacaagtcgaaaactaagtagtaaagcaaaggctcaaactgtttttaggtgaatttatgatctaaatatatctttgggcaaaagtggactgtaggtaaataaaacaaggaagattgagttctctcaccgagcaacctggctttgataccacttgataaacccaacgggtagaagggtgcccgatctttcgatgagagatgatggaggtggaaaacttgttggagaacgacgttggctgcccgactaccacaaccaagatggtgtggcgccttgagcgacaggtacaccgtctcctggtaactacgatttggggtggaggtcgacgttgtgctatccgactacaacaaccacaagggtgctgcaccttagcgatagttacaccggctcctgttgttgctgctcttgtcgtgccaagaacaaccttgaacctgcaagcaatcgagaacaagcaagaacaagataaaaagcagacgctcacggatctgatagagttggggttctgtttcaagtatccgggtggtctagccgacacacgcgtttacaaggaagtagcaaaggctaaacttacatcaaacaaaaacccaagttctttggtggctgctagttgcttaaatagaggaatagaaaggagttctaatggagaacgaaactctctcggcagtttctggatgcctcgtttgggttctgtcattgattcttgatgcacatgaaagtagacgaagagagctttccaacaagtagttatttgcactaaacaaccttgggagtggaaagttatgctccatttaatttggtgcatgctgcagttacgaaattgacttgggtagagcaggagttcactcggcagtttctggacgcttagtgtctctcgttgattcttgatccactaaaaagtagatgaagagaactttccaacaagtgcttatttgcattaaacaaccttgggagctgaaagatatgccctcttaaacttgcacttgttgtagtttcgaaatcccctcaagtggagcagcttttattgccttgttgccttctcaaattctagatggttcacctcccaaacaccttagaataataaagtaatcacaaggtatcagtacctcatttaaggaatgattagcttcaacaacaaggaacgagttcacctgataattaaatttacgtgcacggactcgtttcactggtccatgattaaatggtgaaggaggtcgctggtgtggtgtattgatgacagtgatgtcctcatcacccgttttcggaatgggtgacgtgcagcaatgaaattgcgcgaaaccaccccaaacatgagttttggacctaaagttgtggattgggcatactcgttgcaaaaaacgaagaaacggttccggtggaaaaaactcgtgctttgtatgcaccccgacacccatttttggaatggcggacgtgcggcaacgaaattgcgcgaaaccacaccaaacataagttttggacctaatgtagtggattgggcatgttcgttgcgaaaaacgaagaattggttctggaggcaaaaactcgtgctttgtattcaccccgacacccgttttcggaatgggtgacgtgcggcaatgatatagcgtgaaacaaccccaaacatgagttttggacctaaagtagaggattgggcatgttcgttgcgaaaaacgaagaaatggttccggtggcaaaaactcgtgctttgtatgcaccccgacacccgttttggaaatgggtgacgtacaacaacaaaattgcgtgaaaccaccccacacatgagttttggacctaaagtagtggattgggcatgttcgttgcgtatagcaaagaaatggttccggtggcaaaaactcatgctttgtatgcacccgacacctgttttcggaatgggttacgtgcggcaacgaaatttcgcgaaaccatcccaaacatgagttttggacctaaagtagtggattgggcatgttcgttgcgagaaacgaagaaatggttccggtggcgaaaactcgtgctttgtatgcacacgacacccgttttcggaatgggtgacatgcggcaacgaaattgcgcgaaaccaccccaaacttgagttttggacctaaagtagtggattgggcatgttcgttgcaaaaaacgaagaaatgattccggtggcgaaaactcgtgctttgtatgcaccccgacacccgttttcggaatgggtgacgtgcggcaacgaaattgcgcgaaaccaccccaaacatgagttttggacctaaagtagtggattgggcatgttcgttgcgaaaagcgaaaaatgcttccggtggcaaaaactcgtgctttgtatgcaccccgacaccctttttcggaataggtgacgtgtggcaacgatataacgcgaaacaaccccaaacatgagttttggacctaaagtagaggattgggaatgttcgttgcgaaaaacgaagaattggttccggtagcaaaaactcgtgctttgtatgcaccccgacacccgttttgggaatgggagacgtacggcaacgaaattgcgcgaaaccaccccaaacatgagttttggacctaaagtagtggattgggcatgttcgttgcggaaaaagaagaaatggttccggtggcgaaaactcatgctttgtatgcacccgacacccgttttcggaatgggtgacgtgcagcaacgaaattgtgtgaaaccaccccaaacatgagttttggacttaaagtagtggattgggcatgttcgttgcgaaaaacgaagaaatggttccggtgtcaaaaactagtgctttgtatgcaccccgacacccgttttcggaatgtgtgacgtcccacaacgaaattgcgcgaaaccaccccaaatatgagtttttacctaaagtagtggattgggcatgtttgttgcgaaaaacgaagaattggttcaggtggcgaaaactcgtgctttgtatgcaccccgacacccgttttgggaatgggtgacgtacgacaacgaaattgcgtgaaaccacccctgatgtagctgaggtgcccgatctttcggcgagtagagataattccgatttggcggaagatgacccttgcgatccgactacgacgagcaagcccgaggcgccaatgcaatcgctgaaccaactccctgtggttaccgaccttgctgatgcgagatcggcctgatcacgaagatcgtttcctgtgcgcaatcgaagaacgaacaagaacaagatgcgagcaatctaatctattactcgagggtggagttctgaatacacgaagacagcgcagatttgcgcgtgttcgagagtagctaaggctaacgtaaaacaaaactcaggaaataaaggaggcgcagctcctgaataaatagagagggggcgcagcccctaggggcggccaaccctaggtcgtccattatgggccgcaattgggctggtcgtctattcttccgggccttcgttctttaacaacatgatgtagttcaattctcttgcacgggcccgagtcactggcccaggtggaaggggtggcgcctgggctggagaaggtgctgctggtgtagatgtgctcgtgttggtgttgatgtccgcatcatcctccccttcttgaactgaagtcgtcctcgacggcaactcctcatcttctcccgcatacggtttcaaatctgcaacattaaaactagtggaaacaccaaactccgcaggtaggtcgagggtataagcattatcattaatcttggttagtatcttaaaaggaccagcagcacaaggcatcaatttagaacagcgcaaagtaggaaaacaatcctttctcaaatgcaaccaaaccatatcaccaggttcaaaagtaacatgttttcttcctttactaccagcaacctgattttttgtattagtagcagcaatgttctgtttcgtttgttcatgtatggtaatcatttgttcaacatgtgcagaagcatctacatgtggggcgttcgcagcattaagtgaaatcaaatcaataggtgccctaggaatgtaaccataaacaatctggaaagggcacatctttgtagaagaatgcgtggcatgattgtaagcaaattcaacatgaggcaagcaatcctcccaacgtctcaaattcttgtctaaaacagccctaagcatggtagataaagttctatttactacctcagtttgtccatcagtctgagggtgacaagtagtgctaaacaacaatttagttcccaatttattccatagagatctccaaaaatggcttagaaacttagcatcgcgatcagagattattgttttttggaataccatgtaaacgaataatttctctaaagaacaattcagcaacaatgctagcatcatcagttttatgacaaggtataaagtgagccattttagagaatctatcaacaaccacaaaaatactatccctccccttcttagttctaggaaagcccaaaacaaagtccatagagatatcaagccaaggagaagaagggacaggcaaaggcatatacaacccatggttgttcaaccgtgacttagctttctgacaagtagtgcagcgtgcaacaaggcgctccacatcagcgcgcatccgaggccaaaagaaatgggcagccaacacctcatgtgttttgtagacgccaaaatgccccatgagaccgcctccatgcgcttcctgtaacaacaaaagacgaaccgagctagctggaacacacagcttgttagcacgaaacaggaacccatcctgtatgtgaaatttgccccatggtatcccattaatacaatggccgaaagcatctttaaaatcagcatcgtcaacgtattgatccttcacagtgtccaaagcctcatgatcagaatgaattatgaactcacgatgccaaagataatgctgccaagtatgcaaagtgcgcactaaagcgtaaagctccttatcataagtagaatatttcagactagcaccgcttaatttttcactaaaataagcaactggttttccttcttgtaacaaaacagcacctagcccaataccgctagcatcgcattcaagctcaaaaactttattaaaatcaggcaattgcaagaggggagcttgggttaacttatctttcanagtgctgaacgctacctcctgcgaatcactccaagcaaacggcacatctttctttgtaagctcatgtagaggcgctgncatggagctaaatcacgaacaaatctgcggtagaaaccggcaagtccaagaagctccgaatt

SEQ ID NO: 431 - DNA, 7656 bp, Zea mays
  source (0)...(0): Zea mays BAC clone full insert sequence contig bacm.pk024.f21.fis35
taatcaaaaggggcgaggtcgacggtattgttccgcttgattttgttgcctcgtgctcctattgatttaatgcctttgccatcttctgaaaaactaaattttgatgctactaggcgtgctgaattgatgttaaaactgcatgaaactactaaagaaaacatagagcgtatgaatgctagatataagtttgctagtgataaaggtagaaaggaaataaattttgaacctggagatttagtttggttgcatttgagaaaggaaaggtttcctgaattacgaaaatctaaattgttgcctcgagccgatggaccgtttaaagtgctagagaaaattaatgacaatgcatataggctagatctgcctgcagactttggggttagccccacatttaacattgcagatttaaagccctacttgggagaggaagttgagcttgagtcgaggacgactcaaatgcaagaaggggagaatgatgaagacatccacactactgatacatctatgccaatacaagtaccaatttctggtcccattactcgcgctcgtgctcgtcaactcaaccatcaggtgattacactcttgagttcatgtccatcttatttagaccatagagacccgtgcactcttgttttgcttaggaaccagggagaagaccgaaagggaaaaggatttgaacatgctggattcggactgcagaagaacaccaacttgtgacggtcaccacggtcagatgcgggctcggattggaatgttcaagcacaacatggaaagcttatcaagtctactttcatatggatccggaattatagtcatatctgttctgaggccgccgtaatcattgttttcttaccgagatattttctgccttttctgcccatggtgctgcgtcaccctattttggcccaatgggtcgtgtatcaagttaggtccattagggacgcatcctagggttgcagcacgaccccaatacccttgtggtcgtcctcccatgtttatagaccccctagtcgccaccaagaacagcgggttttgtttagatcaagtttagctctcgctacttgcttgcaagcgcgcgtgctagttcagccgcccgtcttcttgtcttcggaaccccaccatattggagtttgattctgaaacctacatttagatctggtaattcagtacttgttctacttgttcttgctagttcttcgattgcttgcaggacgagtgccctagtggccagggtgtcacgctccacaagatcgtgacagccataggaggtggtgtatcggttgctaaggcgcagcgtctttggaaggctgtagtcgggccgtgaacgtcgtctcctcccccaatcgagttattccacaccctctcatcgaaagatcgggcaatcacccaacgggtgcacatcacctaaagtagtggattgggcatgttcgttgcgaaaagcgaaaaatggttccggtggcaaaaactcgtgctttgtatgcacccgacaaccgttttcggaatgggtgacgtgcagcaacgatatagcgcgaaaccaccccaaacatgagttttggacctaaagtagaggattgggcatgttcgttgcgaaaaaagaagaattggttccggtagcaaaaactcgtgctttgtatgcaccccgacacccgttttggaaatgtgtgacgtgcggcaacgaaattgcgcggaaccaccccaaatatgagttttggacctaaagtagtggattgggcatgttcgttgctaaaaacgaagaaatggttccggtggcgaaaactcgtgctttgtatgcaccccaacacccgttttcggaatgggtgacgtgcggcaatgaaattacgcgaaaccaccccaaacatgagttttggacctaaagtagtggattgggcatgttcgttgcgaaaaatgaataattggtttcagtggcgaaaactcgtgctttgtatgcaccccgacacccgttttcggaatgggtgacgtgcggcaacgaaattgcgcgaaaccaccccaaacatgagttttggatctaaagtagtggattgggcatgttcgttgcgaaaaacgaagaaatggttccgatggcaaaaactcgtgctttgtatgcaccccgacacccgttttcggaatgggtgacgtgcgtgaactatatagcgcgaaaccaccctaaacatgagttttggacctaaagtccatgttcgttgcgaaaaatgaagaattggttccgttggcaaaaactcttgctttgtatgcaccccgacacccgttttgggaatgggtgacgtacgacaacgaaattctgcgaaaccgccccaaacatgagttttggacctaaagtagtggattgggcatgtttgttgcgaaaaacgaagaaatggttccggtggcaaaaactcgttctttgtatgcacccgacacccgttttcggaatgggtgacgtgcggcaacgaaattgcgcgaaaccaccccaaacatgagttttggacctaaagtagtggattgggcatgctcgttgcaaaaaacgaagaaatggttccagtggcgaaaactcgtgctttgtatgcacccgacacccgttttcggaatgggtgacgtgcgacaacgaaatagcgcgaaaccaccccaaacataaaatttggacctaaagtagtggattgggcatgctcgttgcaaaaaacgaagaaatggttctggtggcaaaaactcgtgctttctatgcaccccgacacccgttttcgaaatgggtgacgtgcggcaatgatatagcgcgaaacaaccccaaacatgagttttggacctaaagtagaggattgggcatgttcgttgcgaaaaaaagaagaattggttccggtggcaaaaactcgtgctttgtatgcaccccgacacccgttttggaaatgggtgacgtacgacaactaaattgcgcgaaaccaccccacacatgagttttggacctaaagtagtggattgggcatgttcgttgttaataacaaagaaatggttccggtggtgaaaactcatgctttgtatgcacctgacacccgtttttggaatgggtgacgtgcaacgaaatttcgcgaaaccaccacaaacatgagttttggacctaaagtagtgtattgggcatgttcgttgcgaaaaacaaagaaatgtttccggtggcaaaaactcgtgcttcgtatgcaccccgacacccgttttcggaatgggtaacgtgcggcaacgatatagcgcgaaaccaccccaaacatgagttttggacctaaagtagaggattgggattgttcgttgcgaaaaacgaagaattggttccggtggcaaaaactcgtgctttgtatgcaccccgacacccgttttgggaataggtgacgtacgacaacgaaattgcgcggaaccaccccaaacatgagttttggacctaaagtagtggattgggcatgttcgttgctaaaaacgaagaaatggttccggtggcgaaaactcgtgctttgtatgcaccccaacacccgttttcggaatgggtgacgtgcggcaacgaaattgcgcgaaaccaccccaaacatgagttttggaactaaagtagtggattgggcatgttcgttgcgaaaagcgaaaaatggttccggtggcaaaaactcgtgctttatgcaccccgacaaccgttttcggaatgggtgacgtgcagcaacgatatagcgcgaaaccaccccaaacatgagttttggacctaaagtagaggattgggaatgttcgttgcgaaaaacgaagaattggttccggtggcaaaaactcgtgctttgtatgcaccccgacacccgttttgggaatgggtgacgtacggcaacgaaattgcgcgaaaccactccaaacatgagttgtggacctaaagtagtggattgggcatgctcgttgcaaaaatcgaagaaatggttccggtggtgaaaactcgtgctttgtatgcaccccgacacctgttttcggaatgggtgacgtgcggcaacaaaattgcgcgaaagcaccccaaacataagttttggatctaaactagtggattgggcatgttcgttgcgaaaaaagaagaattggttccggtggaaaaaaactcgtgctttgtatgcaccccgacacccgttttcggaatgggtgacgtgcggcaatgatatagcgcgaaacaaccccaaacatgagttttggacctaaagtagaagattggtcatgttcgttgcgaaaaacgaagaattggttccggtggcaaaaactcgtgctttgtatgcacaccgacacccgttttggaaatgggtgacgtacgacaacgaaattgcgcgaaaccaccccacacatgagttttggacataaagtagtggattgggcatgttcattgcgaataacaaagaaatggttccggtagcgaaaactcatgctttgtatgcacccgacacccgtttccggaatgggtgacgtgcggcaatgatatagcgcgaaacaaccccaaacatgagttttggatctaaagtagaggattgggcatgttcgttgcaaaacaagaattattggttccggtggaaaaaactcgtgctttgtatgcaccccgacacccgttttggaaatgggtgacgtacgacaacgaaattgcgcgaaaccaccccacacatgagttttggacctaaagtagtggattgggcatgttcgttgtgaataacaaagaaatggttccggtggcgaaaactcatgctttgtatgcacccgacacccgttttcggaatgggtgacgtgcggcaacgaaatttcgcgaaaccaccccaaacatgagttttggacctaaagtagtgtattgggcattttcgttgcaaaaaacgaagaaatggttccggtggcaaaaactcgtgctttgtatgcatcccgacacccatttttggaatgggtgacgtgcggcaacgatatagcgtgaaaccaccccaaacatgagttttggacctaaagtagaggattgggaatgttcgttgcgaaaaacgaagaattggttccggttgcaaaaacttgtgctttgtatgcaccgcgacacccgttttggaaataggtgacgtacgacaacgaaattgcacgaaaccaccccaaacatgagttttggacctaaagtagtggattgggcatgttcgttgcgaaaaacgaagaaatggttccggtggcgaaaactcttgctttgtatgcacccgacacccgttttcggaatgggtgacgtgcggcaacgaaattgcgcgaaaccacaccaaacatgagttttggacctaaagtagtggattgggcatgttcgttgcgaaaaatgaagaaatggttccgatggcaaaaactcgtgcattgtatgcaccctgacacccgttttcggaatgggtgacgtgcggcaacgatatagcgcaaaaccaccccaaacatgagttttggacctaaagtagaggattgggaatgttcgttgcgaaaaacgaagaattggttccggtggcaaaaactcgtgctttctatgcaccccgacacccgttttgggaatggttgacgtacgacaacaaaattgcgcgaaaccaccccaacacatgagttttggacataaaatagtggattgggcatgttcgttgcgaaaaacgaagaaatggttccggtggcgaaaactcatgctttgtatgcacccgacacccgttttcggaatgggtgacgtgcggcaatgatatagcgcgaaagaaccccaaacatgagttttggacctaaactagaggattgggcatgttcgttgcgaaaaaagaagaattggttctggtggcaaaaagtcgtgctttgtatgcaccccgacacccgttttggaaatgggtgacgtacgacaacaaaattgcgtgaaaccaccccacacatgagttttggacctaaagaagtgcattgggcatgttcgttgcgaataacaaagaaatggttccggtggcgaaaactcatgctttgtatgcacccgacacccgttttcggaatgggtgacgtgcgacaacgaaatttcgcgaaaccaccccaaacatgagttttggacctaaagtagtggattgggcatgttcgttgtgaataacaaagaaatggttccggtggcgaaaactcatgctttgtatgcacctgacacccgttttcggaatgggtgacgtgcggcaacgaaatttcgtgaaaccaccccaaacatgagttttggacctaaagtagtgtattgggcatgttcgttgcaataaatgaagaaatggttccggtggcaaaactcgtgctttgtatgcaccccgacacccgttttcggaatgtgtgacgtcccgcaacgaaattgcgcgaaaccaccccaaatatgagtttttacctaaagtagtgtattgggcatgttcgttgcgaaaaacgaagaaatggttccggtggcaaaaactcgtgctttgtatgcaccccgacactcgttttcggaatgggtgacgtgcggcaacgaaattgcgcaaaaccaccccaaacatgagttttggacctaaagtagtggattgggcatgctcgttgcaaaaatcaaagaaatggttccggtggcgaaaactcgtgctttgtatgcaccccgacacctgttttcggaatgggtgacgtgcggcaacgaaattgcgcgaaagcaccccaaacataagttttggacctaaagtagtggattgggcatgttccttgcgaaaaacgaagaaatggttccggtggcaaaaactcgtgctttgtatgcaccccgacacccgttttcggaatgggtgacgtgcggcaacgatatagcgcgaaaccaccccaaacatgacttttggacctaaagtagaggattgggaatgttcgttgcgaaaaacgaagaattggttccgatggcgaaaacgcgtgctttgtatgcaccccgacaccagttttgggaatgggtgacgtacggcaacgaaattgcgcgaaaccaccccaaacatgagttttggacctaaagtagtggattgggcatgctcgttgcaaaaatgaagaaatggttccagtggtgaaaacttgtgctttgtatgcacctcgacacctgttttcggaatgggtgacgtgcggcaacgaaattgcgtgaaaccaccccaaacatgagttttggacctaaagtagtggattgggcatgttcgttgcgaaaagcgaaaaatggttccggtggcaaaaactcgtgctttgtatgcaccccgacaaccgttttcggaatgggtgatgtgcagcaacgatatagcgcgaaaccaccccaaacatgagttttggacctaaagtagaggattgggaatgttcgttatgcaaaatgaagaattggttccggtggcaaaaacttgtgctttgtatgcaccccgacacccgttttgggaatgggtgacgtacgacaacgaaattgcgcgaaaccaccccaaacatgagttttggacctaaagtagtggattgtgcatgttcgttgcggaaaacgaagaaatggttccggtggcaaaaactaatgctttgtgtgcaccctgacacccgttttcggaatgggtgacgtgcggcaacgaaattgcgtgaaaccaccccaaacatgagttttggacctaaagtagaggattgagaatgttcgttgcgaaaaacgaagaa

SEQ ID NO: 432 - DNA, 6965 bp, Zea mays
  source (0)...(0): Zea mays BAC clone full insert sequence contig bacm.pk024.f21.fis36
tgtttagagctaacaagctatgcattccagctagctccgttcgtttgttgttgttacaggaagcacatggaggtggcttaatgggacattttggagcaaagaaaacggaggacatacttgctggtcatttcttttggcccaagatgagaagagatgtggtgagattgattgctcgttgcacgacatgtcaaaaggcgaagtcacggttaaatccacacggtttgtatttgcctctacctgttcctagtgctccttgggaagatatttctatggattttgtgctgggattgcctaggactaggaagggacgtgatagtgtgtttgtggttgttgatagattttctaagatggcacatttcataccatgtcataaaactgacgatgctactcatattgctgatttgttctttcgtgaaattgttcgcttgcatggtgtgcccaacacaatcgtttctgatcgtgatgctaaatttcttagtcatttttggaggactttgtggacaaaattggggactaagcttttattttctactacatgtcatcctcaaactgatggtcaaactgaaagtgtgaatagactttgtctactatgttaagggcagttctaaagaagaatattaagatgtgggaggactgtttgcctcatgttgaatttgcttataatcgatcattgcattctactacaaagatgtgcccatttcagattgtatatggtttgttgcctcgtgctcctattgatttaatgcctttgccatcttctgaaaaactaaattttgatgctactaggcgtgctgaattgatgttaaaactgcatgaaactactaaagaaaacatagagcgtatgaatgctagatataagtttgctagtgataaaggtagaaaggaaataaattttgaacctagagatttagtttggttgcatttgagaaaggaaaggtttcctgaattgcgaaaatctaagttgttgcctcgagccgatggaccgtttaaagtgctagagaaaattaacgacaatgcatataggctagatctgcctgcagactttggggttagccccacatttaacattgcagatttaaagccctacttgggagaggaagttgagcttgagtcgaggacgactcaaatgcaagaaggggagaatgatgaagacatccacactactgatgcatctataccaatacaagtaccaatttctggtcccattactcgcgctcgtgctcgtcaactcaaccatcaggtgattacactcttgagtttatgtccatcatatttagaccatggagacccgtgcactcttgttttgcttaggaatcagggagaagaccgaaagggaaaaggatttgaacatgctggattcggactgcagaagaacaccaacttgtgacggtcaccacggtcagatgcgggctcggattggaatgttcaagcacaacatggaaagcttatcaagtctactttcatatggatccggaattatagtcatatctgttctgaggccgccatcatcattgttttcttaccgagacatttcctgccttttctgcccatggtgctgcgtcaccctattttggcccaatgggtcgtgtatcaagttaggtccattagggacgcatcctagggttgcagcacgacaccaatacccttgtggtcgtcctcccatgtttataaaccccctagccgccaccaagaacagcgggtttttgtttagatcaagtttagctctcgctacttgcttgtaagcgcgcgtgctagttcagccgcccgtcttcttgtcttcggaaccccaccatattggagtttgattttgaaacctacatttagatctggtaattcagtacttgttctacttgttcttgctagttcttcgattgcttgcaggacgagtgccctagtggccagggtgtcacgctccacaagatcgtgacagccataggaggtggtgtatcggttgctaaggcgcagcgtctttggaaggctgtagtcgggccgtgaacgtcgtctcctcccccaatcgagttattccacaccctctcatcgaaagatcgggcaatcacccaacgggtgcacatcacgtcacacatttccaaaacgggtgtcggggtgcataccggaaccaattcttcttttttcgcaacgaacatgcccaatcctctactttaggtccaaaactcatgtttggggtggtttcgcgctatatcattgccgcacgtcacccattccgaaaacgggtgtcgggtgcatacaaagcatgagttttcgccaccgaaaccattttctttgttattcgcaacgaacatgcccaatccagtactttatgtccaaaactcatgtgtggggtggtttcgcgcaatttcgttgtcgtacgtcacccatttccaaaacgggtgtcggggtgcatacaaagcacgagtttttgccaccggaaccattttacgcttttcgcaacgaacatgcccaatccactactttaggtccaaaactcatgtttggggtggtttcgcgtaatttcgttgccgcacgtcacccattccgaaaacgggtgttggggtgcatacaaagcacgagttttcgccaccggaaccatttcttcgttttttgcaacgaacatgcccaatccactactttaggtccaaaactcatgtttggggtggttccgcgcaatttcgttgccgcacgtcacacatttccaaaacgggtgtcggggtgcatacaaagcacgagtttttgctaccggaaccaattcttttttcgcaacgaacatgcccaatcctctactttaggtccaaaactcatgtttggggtggtttcgcgctatatcattgccgcacgtcacccattccggaaacgggtgtcgggtgcatacaaagcatgagttttcgctaccggaaccatttctttgttattcgcaatgaacatgcccaatccactactttatgtccaaaactcatgtgtggggtggtttcgcgcaatttcgttgtcgtacgtcacccatttccaaaacgggtgtcggtgtgcatacaaagcacgagtttttgctaccggaaccaattcttttttcgcaacgaacatgcccaatcttctactttaggtccaaaactcatgtttggggtggtttcgcgctatatcattgccgcacgtcacccattccggaaacgggtgtcgggtgcatacgaagcatgagttttcgctaccggaaccatttctttgttattcgcaatgaacatgcccaatccactactttatgtccaaaactcatgtgtggggtggtttcgtgcaatttcgttgtcgtacgtcacccatttccaaaacgggtgtcggtgtgcatacaaagcacgagtttttgccaccggaaccaattcttcgtttttcgcaacgaacatgcccaatcttctactttaggtccaaaactcatgtttggggttgtttcgcgctatatcattgccgcacgtcacccattccgaaaacgggtgtcggggtgcatacaaagcacgagttttttccaccggaaccatttcttcgtttttcgcaacgaacatgcccaattcactagtttagatccaaaacttatgtttggggtgctttcgcgcaatttcgttgccgcacgtcacccattccgaaaacaggtgtcgggggtgcatacaaagcacgatttttcgccaccgaaaccatttcttctatttttgcaacaagcatgcccaatccactacttttggtccacaactcatgtttggagtggtttcgcgcaatttcgttgccgcacgtcacccatttccaaaacgggtgtcggggtgcatacaaagcacgagtttttgctaccggaaccaattcttctttttttgcaacgaacatgcccaatcctctactttaggtccaaaactcatgtttggggtggtttcgcgctatatcgttgctgcacgtcacccattccgaaaacggttgtcggggtgcatacaaagcacgagtttttgccaccggaaccatttttcgcttttcgcaacgaacatgcccaatccactactttaggtccaaaagtcatgtttggggtggtttcgcgcaatttcgttgccgcgcgtcacccattccgaaaacgggtgttggggtgcatacaaagcacgagttttcgccaccggaaccatttcttcgttttttgcaacgaacatgcccaatccactactttaggtccaaaactcatgtttggggtggttccgtgcaatttcgttgccgcacgtcacacatttccaaaacgggtgtcggggtgcatacaaagcacgagtttttgctaccggaaccaattcttcctttttcggaacgaacatgccaaatcctctactttaggtccaaaactcatgtttggggtggtttcgcgctatatcattgccgcacgtcacccattccgaaaacgggtgtcgggtgcatacaaagcatgagtttttgccaccggaaccatttctttgtttttcgcaacgaacatgcccaatccagtactttaggtccaaaactcatgtttggggttgtttcgcgctatatcattgccgcacgtcacccattcccaaaacgggtgtcggggtgcatacaaagcacgagtttttttccaccggaaccatttcttcgtttttcgcaacgaacatgcccaatccactagtttagatccaaaacttatgtttggggtgctttcgcgcaatttcgttgccgcacatcacccattccgaaaataggtgtcggggtgcatacaaagcacgagttttcgccaccggaaccatttcttcgatttttgcaacgagcatgcccaatccactactttaggtccacaactcatgtttggagtggtttcacgcaatttcgttgccgtacgtcacccattcccaaaacgagtgtcggggtgcatacaaagcacgagtttttgccaccggaaccaattcttcgtttttcgcaacgaacattcccaatcctctactttaggtccaaaactcatgtttggggtggtttcgcgctatatcgttgctgcacgtcacccattccgaaaacggttgtcggggtgcataaagcacgagtttttgccaccggaaccatttcttcgtttttcgcaacgaacatgcccaatgcactactttaggtccaaaactcatgtttggggtggtttcgcgcaatttcgttgccgcacgtcacccattccgaaaacgggtgttggggtgcatacaaagcacgagttttcgccaccggaaccatttcttcgttttttgcaacgaacatgcccaatccactactttaggtccaaaactcatgtttggggtggttccgcgcaatttcgttgccgcacgtcatgatgaagacatccacactactgatgcatctataccaatacaagtaccaatttctggtcccattactcgcgctcgtgctcgtcaactcaaccatcaggtgattacactcttgagttcatgtccatcatatttagaccatggagacccgtgcactcttgttttgcttaggaatcagggagaagaccgaaagggaaaaggatttgaacatgctggattcggactgcagaagaacaccaacttgtgacggtcaccacggtcagatgcgggctcggattggaatgttcaagcacaacatggaaagcttatcaagtctactttcatatggatccggaattatagtcatatctgttctgaggccgccgtaatcattgttttcttaccgagacatttcctgccttttctgcccatggtgctgcgtcaccctattttggcccaatgggtcgtgtatcaagttaggtccattagggacgcatcctagggttgcagcacgaccccaatacccttgtggtcgtcctcccatgtttataaaccccctagcctgatgcggacatcaacaccaacacgagcacatctacaccagcagcaccttctccagcccaggcgccaccccttccacctgggccagtgactcgggcccgtgcaagagaattgaactacatcatgttgttaaagaacgaaggcccagaagaatagacgaccaggccaattgcggcccataatggacgacctagggttggccgccccctaggggctgcgccccctctctatttattcaggagctgcgcctcctttattttccgagttttgttttacgttagccttagctactctcgaacacgcgcaaatctgcgctgtcttcgtgtattcagaactccaccctcgagtaatagattagattgctcgcctctttttcttgttcgttcttcgattgcgcataggaaacgatcttcgtgatcaggccgatctcgcaacagcaaggtcggtaaccacagggagttggttcagcgattgcattggcgcctcgggcttgctcgtcgtagtcggatcgcaagggtcatcttctgctaaatcggaattatctctactcgccgaaagatcgggcacctcagcttcatcattggtatcagatttccaggttgatcggtgagtttatcgagcgttttttttccctacagtccacaaaaccacataaaaattcaggttagatcttatcccagcacccttttgagcctcgcactttctttcaataatctgcattgttgaatttgtgtgctttcgcgtttccttgttgctggttgcattgtgttcttccaccattcaaatcctagcgccgccaccatctcccgtttgatcacgccacaaaccgagtcaacattgtctccttgtttttctccttcggttacgtcaaaaagaaaacagaaaaaacaaaccgaggcaacggccgtttccttgattttctccttcggttacgaaaaaaaaacagaaaaaaaaacaaaccgagtcaacgaccgcttccttgtttttctcctacggttgtttcattccggtagtttttaaaacataacttgaggtaccttccgtaaaccgggcataacttttcgctcgggtgtccaaaaaatctgaaatttttacaggagcttg

SEQ ID NO: 433 - DNA, 3525 bp, Zea mays
  source (0)...(0): Zea mays BAC clone full insert sequence contig bacm.pk024.f21.fis37
ttgcaacgagcatgcccaatccactacttttggtccacaactcatgtttggagtggtttcgcgcaatttcgttgccgtacgtcacccattcccaaaacgggtgtcggggtgcatacaaagcacgagtttttgccaccggaaccaattcttcgtttttcgcaacgaacattcccaatcctctactttaggtccaaaactcatgtttggggtggtttcgcgctatatcgttgctgcacgtcacccattccgaaaacggttgtcggggtgcataaagcacgagtttttgccaccggaaccatttcttcgtttttcgcaacgaacatgcccaatccactactttaggtccaaaactcatgtttggggtggtttcgcgcaatttcgttgccgcacgtcacccattccgaaaacgggtgttggggtgcatacaaagcacgagttttcgccaccggaaccatttcttcgttttttgcaacgaacatgcccaatccactactttaggtccaaaactcatgtttggggtggttccgcgcaatttcgttgccgcacgtcacacatttccaaaacgggtgtcggggtgcatacaaagcacgagtttttgctaccggaaccaattcttttttcgcaacgaacatgcccaatcctctactttaggtccaaaactcatgtttggggtggtttcgcgctatatcattgccgcacgtcacccattccggaaacgggtgtcgggtgcatacaaagcatgagttttcgctaccggaaccatttctttgttattttcatgaacatgcccaatccactacttatgtccaaaactcatgtgtggggtggtttcgcgcaatttcgttgtcgtacgtcacccatttccaaaacgggtgtcggtgtgcatacgaagcacgagtttttgccaccggaaccaattcttcgtttttcgcaacgaacatgcccaatcttctactttaggtccaaaactcatgtttggggttgtttcgcgctatatcattgccgcacgtcacccattccgaaaacgggtgtcggggtgcatacaaagcacgagttttttccaccggaaccatttcttcgtttttcgcaacgaacatgcccaatccactagtttagatccaaaacttatgtttggggtgctttcgcgcaatttcgttgccgcaggtcacccattccgaaaacaggtgtcggggtgcatacaaagcacgagttttcgccaccggaaccatttcttcgatttttgcaacgagcatgcccaatccactactttaggtccacaactcatgtttggagtggtttcacgcaatttcgttgccgtacgtcacccattcccaaaacgggtgtcggggtgcatacaaagcacgagtttttgccaccggaaccaattcttcgtttttcgcaacgaacattcccaatcctctactttaggtccaaaactcatgtttggggtggtttcgcgctatatcgttgctgcacgtcacccattccgaaaacggttgtcggggtgcataaagcacgagtttttgccaccggaaccatttcttcgtttttcgcaacgaacatgcccaatccactactttaggtccaaaactcatgtttagggtggtttcgcgcaatttcgttgccgcacgtcacccattccgaaaacgggtgttggggtgcatacaaagcacgagttttcgccaccggaaccatttcttcgttttttgcaacgaacatgcccaatccactactttaggtccaaaactcatgtttggggtggttccgcgcaatttcgttgccgcacgtcacacatttccaaaacgggtgtcggggtgcatacaaagcacgagtttttgctaccggaaccaattcttcttttttcgcaacgaacatgcccaatcctctactttaggtccaaaactcatgtttggggtggtttcgcgctatatcattgcagcacgtcacccattccgaaaacgggtgtcgggtgcatacaaagcatgagttttcgccaccggaaccatttctttgttattcgcaacgaacatgcccaatccagtactttatgtccaaaactcatgtgtggggtggtttcgcgcaatttcgttgtcgtacgtcacccatttccaaaacgtgtgtcagggtgcatacaaagcacgagtttttgccaccggaaccaattcttcattttttgcaacgaacatgcccaatcctctactttaggtccaaaactcatgtttggggtggtttcgcgctatatcattgccgcacgtcacccattccggaaacgggtgtcgagtgcatacaaagcatgagttttcgccaccggaaccatttctttgttattcgcaatgaacatgcccaatccactactttatgtccaaaactcatgtgtggggtggtttcgcgcaatttcattgtcgtacgtcacccatttccaaaacgggtgtcggggtgcatacaaagcacgagtttttgccaccggaaccaattcttcgtttttcgcaacgaacatgtccaatcctctactttaggtccaaaactcatgtttggggttgtttcgcgctatatcattgccgcacgtcacccattccgaaaacgggtgtcggggtgcatacaaagcacgagtttttccaccggaaccatttcttcgttttcgcaacgaacatgcccaatccactagtttagatccaaaacttatgtttggggtgctttcgcgcaattttgttgccgcacgtcacccattccgaaaacaggtgtcggggtgcatacaaagcacgagttttcgccaccggaaccatttcttcgatttttgcaacgagcatgcccaatccactactttaggtccacaactcatgtttggtgtggtttcgcgcaatttcgttgccgtacgtcacccattcccaaaacgggtgtcggggtgcatacaaagcacgagtttttgccaccggaaccaattcttcgtttttcgcaacgaacattcccaatcctctactttaggtccaaaactcatgtttggggtggtttcgcgctatatcgttgctgcacgtcacccattccgaaaacggttgtcggggtgcataaagcacgagtttttgccaccggaaccatttcttcgtttttcgcaacgaacatgcccaatccactactttaggtccaaaactcatgtttagggtggtttcgcgcaatttcgttgccgcacgtcacccattccgaaaacgggtgttggggtgcatacaaagcacgagttttcgccaccggaaccatttcttcgttttttgcaacgaacatgcccaatccactactttaggtccaaaactcatgtttggggtggttccgcgcaatttcgttgccgcacgtcacacatttccaaaacgggtgtcggggtgcatacaaagcacgagtttttgctaccggaaccaattcttcttttttcgcaacgaacatgcccaatcctctactttaggtccaaaactcatgtttggggtggtttcgcgctatatcattgccgcacgtcacccattccgaaaacggttgtcgggg

SEQ ID NO: 434 - DNA, 11114 bp, Zea mays
  source (0)...(0): Zea mays BAC clone full insert sequence contig bacm.pk024.f21.fis38
cgatgattgcggagcgctcagaacgaattttgagataaggtcagatccgttggaaagaagataagataagctttccagattgtatttaaacttccaaatcggatatgatatgtatccgtggtggcaaaaacgaaccagagatgtttttggtgatggtggatctcgtggtgaccaaaacgtggtagaactcaaaactctaaaggaataaactaagaccagcaactcgacacaaccgatgcaaccaaaaactcaacaagccctaactaagtagtactagtaaatgctcaatggtttataggattgcggtaaaactaatctactatttttttggctttttctggactataggagataagaaaacagcgaagaaaagtaaatctctcaccgataaaccttgctctgattaccaactgatgtgcacccgttgggtgattgcccgatctttcgatgagagggtgtggaataactcgattgggggaggagacgacgttcacggcccgactacagccttccaaagacgctgcgccttagcaaccgatacaccacctcctatggctgtcacgatcttgtggagcgtgacaccctggccactagggcactcgtcctgcaagcaatcgaagaactagcaagaacaagtagaacaagtactgaattaccagatctaaatgtaggtttaaaaatcaaactccaatatggtggggttccgaagacaagaagacgggcggctgaactagcacgcgcgcttgcaagcaagtagcgagagctaaacttgatctaaacaaaacccgctgttcttggtggcggctagggggtttataaacatgggaggacgaccacaagggtattggggtcgtgctgcaaccctaggatgcgtccctaatggacctaacttgatacacgacccattgggccaaaatagggtgacacagcaccatgggcagaaaaggcaggaaatgtctcggtaagaaaacaatgattacggcggcctcagaacagatatgactataattccggatccatatgaaagtagacttgataagctttcgatgttgtgcttgaacattccaatccgagcccgcatctgaccgtggtgaccgtcacaagttggtgttcttctgcagtccgaatccagcatgttcaaatccttttctctttcggtcttctccctgattcctaagcaaaacaagagtgcacgggtctccatggtctaaatatgatggacatgaactcaagagtgtaatcacctgatggttgagttgacgagcacgagcgcgagtaatgggaccagaaattggtacttgtattggtatagatgcatcagtagtgtggatgtcttcatcattaggtccaaaacttatgtttggggtggtttcgcgcaatttcgttgccgcacgtcacccattccgaaaacgggtgttggggtgcatacaaagcacgagttttcgccaccggaaccatttcttattttttgcaacgaacatgcccaatccactactttaggtccaaaactcatgtttggggtgattccgtgcaatttcgttgccgcacgtcacacatttccaaaacgggtgtcggggtgcatacaaagcacgagtttttgctaccggaaccaattcttcctttttcgcaacgaacatgcccaatcctctactttaggtccaaaactcatgtttggggtggtttcgcgccatatcattgccgcacgtcacccatttcgaaaacgggtgtcgggtgcatacaaagcatgagttttcgccaacggaaccatttctttgttattcgcaacgaacatgcccaatccagcactttatgtccaaaactcatgtgtgggggtggtttcgcgcaatttcgttgtcgtacgtcacccatttccaaaacgggtgtcggggtgcatacaaagcacgagtttttgccaccggaaccatttcttgcttttcgcaacgaacatgcccaatccactactttagttccaaaactcatgtttggggtggtttcgcgcaatttcgttgccgcacgtcacccattccgaaaacgggtgttggggtgcatacaaagcacgagttttcgccaccggaaccatttcttcgtttttagcaacgaacatgcccaatccactactttaggtccaaaactcatgtttggggtggttccgcgcaatttcgttgccgcacgtcacacatttccaaaacgggtgtcggggtgcatacaaagcacgagtttttgctaccggaaccaattcttctttttttgcaacaaacatgcccaatcctctattttaggtccaaaactcatgtttggggtggtttcgcgctatatcattgctgcacgtcacccattccgaaaacgggtgtcgggtgcatacaaagcatgagttttcgccaccggaaccatttctttgttattcgcaacgaacatgcccaatccagtactttatgtccaaaactcatgtgtggggtggtttcgcgcaatttcgttgtcgtacgtcacccatttccaaaacgggtgtcggggtgcatacaaagcacgagtttttgccaccggaaccatttttcgcttttcgcaacgaacatgcccaatccactactttaggtccaaaactcatgtttggggtggtttcgcgtaatttcgttgccgcacgtcacccattccgaaaatgggtgttggggtgcatacaaagcatgagttttcgccaccggaaccatttcttcgttttttgcaacgaacatgcccaatccactactttaggtccaaaactcatgtttggggtggttccgcgcaatttcgttgccgcacgtcacacatttccaaaacgggtgtcggggtgcatacaaagcacgagtttttgctaccggaaccaattcttctttttttgcaacgaacatgcccaatcctctactttaggtccaaaactcatgtttggggtggtttcgcgctatatcgttgccgcacgtcacccattccgaaaacgggtgtcggggtgcatacaaagcacgagtttttgccaccggaaccatttttcacttttcgcaacgaacatgcccaatccactactttaggtccaaaactcatgtttggggtggtttcgcgcaacttcgttgccgcacgtcacccattccgaaaacgggtgttggggtgcatacaaagcacgagttttcgccaccggaaccatttcttcgttttttgcaacgaacatgcccaatccactactttaggtccaaaactcatgtttggggtggttccgcgcaatttcgttgccgcacgtcacacatttccaaaacgggtgtcggggtgcatacaaagcacgagtttttgctaccggaaccaattcttctttttcgcaacgaacatgcccaatcctctactttaggtccaaaactcatgttggggtggtttcgcgttatatcattgctgcacgtcacccattccgaaaacgggtgtcgggtgcatacaaagcatgagttttcgccaccggaaccatttctttgttattcgcaacgaacatgcccaatccagtactttatgtccaaaactcatgtgtggggtggtttcgcgcaatttcgttgtcgtacgtcacccatttccaaaacgggtgtcggtgtgcatacaaagcacgagtttttgccaccggaaccaattcttcgtttttcgcaacgaacatgaccaatcttctactttaggtccaaaactcatgtttggggttgtttcgcgctatatcattgccgcacgtcacccattccgaaaacgggtgtcggatacaaagcacgagttttttccaccggaaccatttcttcgtttttcgcaacgaacatgcccaatccactagtttagatccaaaacttatgtttggggtgctttcgcgcaatttcgttgccgcacgtcacccattccgaaaacaggtgtcggggtgcatacaaagcacgagttttcgccaccggaaccatttcttcgatttttgcaacgagcatgcccaatccactactttaggtccacaactcatgtttggagtggtttcgcgcaatttcgttgccgtacgtcacccattcccaaaacgggtgtcggggtgcatacaaagcacgagtttttgccaccggaaccaattcttcgtttttcgcaacgaacattcccaatcctctactttaggtccaaaactcatgtttggggtggtttcgcgctatatcgttgctgcacgtcacccattccgaaaacggttgtcggggtgcatacaaagcacgatttttgccaccggaaccatttcttcgtttttcgcaacgaacattctcaatcctctactttaggtccaaaactcatgtttggggtggtttcgcgctatatcgttgccgcccgtcacccattccgaaaacgggtgtcaaggtgcatacaatgcacgagtttttgccaccggaaccatttcttcgtttttcgcaacgaacatgcccaatccactactttaggtccaaaactcatatttggggtggtttcgcgcaatttcgtagccgcacgtcacccattccgaaaatgggtgtcgggtgcatacaaagtatgagttttcgccgccggaaccaattcttcgtttttcgctacgaacatgcccagtccactactttaggtaaaaactcatatttggggtggtttcgcgcaatttcgttgcgagacgtcacacattccaaaaacgggtgtcggggtgcatacaaagcacgactttttgccaccggaaccatttcttcgtttttcgcaacgaacattctcaatcctctactttaggtccaaaactcatgtttggggtggtttcacgcaatttcgttgccgcacgtcacccattccgaaaacgggtgtcagggtgcacacaaagcattagtttttgccaccggaaccatttcttcgttttccgcaacgaacatgcacaatccactactttaggtccaaaactcatgtttggggtggtttcgcgcaatttcgttgtcgtacgtcacccattcccaaaacgggtgtcggggtgcatacaaagcacaagtttttgccaccggaaccaattcttcattttgcataacgaacattcccaatcctctactttaggtccaaaactcatgtttggggtggtttcgcgctatatcgttgctgcacatcacccattccgaaaacggttgtcggggtgcatacaaagcacgagtttttgccaccggaaccatttttcgcttttcgcaacgaacatgcccaatccactactttaggtccaaaactcatgtttggggtggtttcgcgcaatttcgttgccgcacgtcacccattccgaaaacgggtgttggggtgcatacaaagcacgagttttcaccaccggaaccaattcttcatttttcataacaaacattcccaatcctctactttaggtccaaaactcatgtttggggtggtttcgcgctatatcgttgctgcacgtcacccattccgaaaacgggtgtcggggtgcatacaaagcacgagtttttgccaccggaaccatttttcgcttttttcaaagaacatgccccatcccctaccttatggcccaaaatcatgtctgggggtggtttcgtgcaatttcgttgccgcacgtcacccatttcgaaaaacgggtgttggggtgcatacaaagcacgagttttcgccaccggaaacatttctttgatttttgcaacgagcatgcccaatccactactttaggtccaaaactcatgtttggggtggtttcgcacaatttcgttgcagtacgtcacccattcccaaaacgggtgtcggggtgcatacaaagcacgagttttcgccaccggaaccaattcttcgtttttcgcaacgaacattcccaatcctctacttcaggtccaaaactcatgtttggggtggttccgtgcaatttcgttgccgcacgtcacacattccgaaaacgggtgtcgggtgcatacaaagcacgatttttcgccaccggaaccatttcttcgtttttgcaacgaacatgcccaatctactcctttaggtccaaaactcatgtttgggtggtttcgcgaaatttcgttgccgcacgtaacccattccgaaaacaggtgtcgggtgcatacaaagcatgagttttcgccaccggaaccatttctttgttattcgcaactaacatgcctaatccactactttatgtccaaaactcatgtgtggggtggtttcgcgcaatttcgttgtcgtacgtcacccatttccaaaacgggtgtcggggtgcatacaaagcacgagttttcgccactggaaccatttcttcgtttttcgcaacgaacatgcccaattctctactttaggtccaaaaatcatgtttggggttgtttcgcgctatatcattgccgcacgtcacccattccggaaacgggtgtcggggtgcatacaaagcacaagtttttgccaccggaaccatttcttcgttttttgcaacaaacatgcccaatccactactttaggtccaaaacttaagtttggggtggtttcgcgcaatttcgttgccgcacgtcacccattccgaaaacgggtgtcggggtgcatacaaagcacaagttttcaccaccggaaccatttcttcgttttttgcaatgagcattgatgtgcacccgttgggtgattgcccgatctttcgatgagagggtgtggaataactcgattgggggaggagacgacgttcacggcccgactacagccttccaaagacgctgcgccttagcaaccgatacaccacctcctatggctgtcacgatcttgtggagcgtgacaccctggccactagggcactcgtcctgcaagcaatcgaagaactagcaagaacaagtagaacaagtactgaattaccagatctaaatgtaggtttaaagatcaaactacaatatggtggggttccgaagacaagaagacgggcggctgaactagcacgcgcgcttgcaagcaagtagcgagagctaaacttgatctaaacaaaacccgctgttcttggtggcggctagggggtttataaacatgggaggacgaccacaagggtattggggtcgtgctgcaaccctaggatgcgtccctaatggacctaacttgatacacgacccattgggccaaaatagggtgacgcagcaccatgggcagaaaaggcaggaaatgtctcggtaagaaaacaatgattacggcggcctcagaacagatatgactataattccggatccatatgaaagtagacttgataagctttccatgttgtgcttgaacattccaatccgagcccgcatctgaccgtggtgaccgtcacaagttggtgttcttctgcagtccgaatccagcatgttcaaatccttttccctttcggtcttctccctgattcctaagcaaaacaagagtgcacgggtctccatggtctaaatatgatggacatgaactcaagagtgtaatcacctgatggttgagttgacgagcacgagcgcgagtaatgggaccagaaattggtacttgtattggtatagatgcatcagtagtgtggatgtcttcatcattctccccttcttgcatttgagtcgtcctcgactcaagctcaacttcctctcccaagtagggctttaaatctgcaatgttaaatgtggggctaaccccaaagtctgcaggcagatctagcctatatgcattgtcgttaattttctctagcactttaaacggtccatcggctcgaggcaacaatttagattttcgtaattcaggaaacctttcctttctcaaatgcaaccaaactaaatctccaggttcaaaatttatttcctttctacctttatcactagcaaacttatatctagcattcatacgctctatgttttctttagtagtttcgtgcagttttaacatcaattcagcacgcctagtagcatcaaaatttagtttttcagaagatggcaaaggcattaaatcaataggagcacgaggtaacaaaccatatacaatctgaaatgggcacatctttgtagtagaatgcaatgatcgattataagcaaattcaatatgaggcaaacagtcctcccacatcttaatattcttctttagaactgcccttaacatagtagacaaagttctattcacaacttcagtttgaccatcagtttgaggatgacatgtagtagaaaataaaagcttagtccccaattttgcccacaaagtcctccaaaaatgactaagaaatttagcatcacgatcagaaacgattgtgttgggcacaccatgcaagcgaacaatttcacgaaagaacaaatcagcaatatgagtagcatcgtcagttttatgacatggtatgaaatgtgccatcttagaaaatctatcaacaaccacaaacacactatcacgtcccttcctagtcctaggcaatcccagcacaaaatccatagaaatatcttcccaaggagcactaggaacgggtagaggcaaatacaaaccgtgtggatttaaccgtgacttcgccttttggcatgtcgtgcaacgagcaaccaatctcaccacatctcttctcatcttgggccaaaagaaatgaccagcaagtatgtcctccgttttctttgctccaaaatgtcccattaagccacctccatgtgcttcctgtaacaacaacaaacgaacggagctagctggaatgcatagcttgttagctctaaacacaaacccatcactaacgatatatttgttccatcctttcccatctttacaatgcagcaacacatctttaaaatcagcatcatgaacatattggtctttaatcgtctctaatccaaagattttgtagtcaagttgattcagcaaagtatatctcctagacaaagcgtcagcaatgatattctcttttcctttcttgtgcttaataacataaggaaacgattcgataaattcaacccacttagcatttctatggttcagttttccttgactacgaatatgtttcaaagattcatgatcagaatgaataacaaactctttgggccacaaataatgctgccatgtttctaatgttcgcacaagagcatataattccttatcataagtagaataatttacaacagacccactcaatttttcactaaaatatgcaacaggtttgccttcttgtaacaaaacaccacccaatccaattccactagcatcacattcaagctcaaaagtcttattaaaatcaggaagttggaggagaggtgcatgtgtcaacttatctttcagcacgttgaaagcgtgctcttgtactttgccccaactaaaatgcactcccttcttcgtaagctcattcaaaggtgcagcaatggtgctaaagtccttcacaaaacggcgatagaagccagcaagtcctaggaaactccgcacctgtgtgatagtctttggcataggccatccatgtatcgcttctaccttggcttgatcaacctcaattccctgtggagtcacaacataaccaagaaacgaaactcgatcggtgcaaaatgtgcacttctcaaggttaccaaataaacgtgcatctcgtaaagcattaaaaacagcacgcatgtgatcaacatgttcatccatagatttgctgtagatcaatatgtcatcaaagtatactaccacaaattttccaatgaaggcacgcaaaacctcgttcattaatctcatgaaagtgctaggtgcattagttaacccaaaaggcatgactaaccactcatacaatccgaacttagttttgaaagcagttttccattcatctcccaatttcatacgaatctggtggtacccactacgcaaatcaactttagaaaagacaatggcaccactcaattcatcaagcatatcatctaaacgtggaatagggtgtcgataacgtatcgtgatattattaatagccctacaatcaacacacatacgccatgttccatcttttttaggcactaaaataaccggaacagcacacggactaagagactcacgcacgtaacctttgtcgagtagttcttgcacttgtcgctgaatttcttttgtttcctctggatttgtcctatatggcgcacgattcggcaaagatgcaccaggaataagatcaatttggtgctcaatccctcgtataggtggcagcccctctggtatctcacttggaaatacatcagaatactcctgcaaaatgttagtaataacaggaggcaaagaatgttgcatatcttgaattgaaatcaaagcatccttgcataccaaggcgtaggcaacagtagtggaagcaaataattcattaacatcagtttttgttgcaagcaagcaatgtcctttcaattttatcccatctttgttattaccaacagctttaatattcttgttgttctcagttttagctttggtagctttagcaacatcatcacgcacaatagcctcaggggacatgggaagcaaaataattttcttatcatggtgtatgagagaatattgatttgatctaccatgatgcatacaatctgaatcaaattgccatggtctacctagcagaatattacaagcatccataggcacaacatcacagtcaacaacatcacaatatgaaccaatagcaaaattaattcgtaccaacttggttaccttgaccttaccactattgttgagccattgaatgtgatatggatgtgggtgcggtttggtcgtaagtgcaagcttctccaccatgtcgctgctagccaagttgttgcagctacctccatcaatgatcaaacgacatgaacgctccttaatgacacactttgtttgaaacaatgtatgtcgctgattctgctctgccttctccatttgtgcactaagcacacgctgtacaatgaggctctcataatgcactgcatcatctgcaccaatctgttcttcgggtggttccttagtgcctgcatcatcagccgcaagcaaagcaagtgtagcttcatccaaatcactagcagaagaatacccaccatcgtcttttaccaccaaaacacgctgattaggacaatcacgctgcacgtgtccatagcccttgcatcgataacacagaacatctcttgttctacccgtggaggctactgaagaggcactacctgctggtttctgggcag

SEQ ID NO: 435 - DNA, 10229 bp, Zea mays
  source (0)...(0): Zea mays BAC clone full insert sequence contig bacm.pk024.f21.fis39
  misc_feature (1)...(10229): n = A,T,C or G
gttgcaaaaatcgaagaaatggttccggtggtgaaaactcgtgctttgtatgcaccccgacacctgttttcggaatgggtgacgtgcggcaacaaaattgcgcgaaagcaccccaaacataagttttggatctaaactagtggattgggcatgttcgttgcgaaaacgaagaaatggttccggtggaaaaaaactcgtgctttgtatgcaccccgacacccgttttcggaatgggtgacgtgcggcaatgatatagcgcgaaacaaccccaaacatgagttttggacctaaagtagaggattggacatgttcgttgcgaaaaacgaagaattggttccggtggcaaaaactcgtgctttgtatgcaccccgacacccgttttggaaatgggtgacgtacgacaatgaaattgcgcgaaaccaccccacacatgagttttggacataaagtagtggattgggcatgttcattgcgaataacaaagaaatggttccggtggcgaaaactcatgctttgtatgcactcgacacccgtttccggaatgggtgacgtgcggcaatgatatagcgcgaaaccaccccaaacatgagttttggacctaaagtagaggattgggcatgttcgttgcaaaaaatgaagaattggttccggtggcaaaaactcgtgctttgtatgcaccccgacacacgttttggaaatgggtgacgtacgacaacgaaattgcgcgaaaccaccccacacatgagttttggacataaagtactggattgggcatgttcgttgcgaataacaaagaaatggttccggtggcgaaaactcatgctttgtatgcaccccgacacccgtttcgaatgggtgacgtgcggcacgaaaattgcgcgaaagcaccccaaacataagttttgatctaaagtagtggattgggcatgttcgtgcgaaaaaacgaagaaatggttccggtggcaaaaactcgtgctttgtatgcaccccgacacccgttttcggaatgggtgacgtgcggcaatgatatagcgcgaaacaaccccaaacatgagttttggacctaaagtagaggattgggcatgttcgttgcgaaaaacgaagaattggttccggtggcaaaaactcgtgctttgtatgcaccccgacacccgttttggaaatgggtgacgtacgacaacgaaattgcgcgaaaccaccccacacatgagttttggacataaagtagtggattgggcatgttcattgcgaataacaaagaaatggttccggtggcaaaaactcatgctttgtatgcacccgacacccgttttcggaatgggtgacgtgcggcaatgatatagcgcgaaaccaccccaaacatgagttttggacctaaagtagaggattgggcatgttcgttgcgaaaaaagaagaattggttctggtagcaaaaactcgtgctttgtatgcaccccgaaacccgttttggaaatgtgtgacgtgcggcaacgaaatagcgcggaaccacccaaaacaagagttttggacctaaagtagtggattgggcatgttcgttgcaaaaaaacgaagaaatggttccggtggcgaaaactcgtgctttgtatgcaccccaacacccgttttcggaatgggtgacgtgcggcaacgaaattgcacgaaaccaccccaaacatgagttttggacctaaggtagtggattgggcatgttcgttgcgaaaacgaagaaatttttccggtggcaaaaactcgtgctttatgcaccccgacaaccgttttcggaatgggtgacgtgcagcaacgatatagcgcgaaaccaccccaaacatgagttttggacctaaagtagaggattgggaatgttcgttgcgaaaaacgaagaattggttccggtggcaaaaactcgtgctttgtatgcaccccgacacccgttttgggaatgggtgacgtacggcaacgaaattgcgtgaaaccactccaaacatgagttgtggacctaaagtagtggattgggcatgctcgttgcaaaaatcgaagaaatggttccggtggcgaaaactcgtgctttgtatgcacccccgacacccgttttcggaatgggtgacctgcggcaacgaaattgcgcgaaagcaccccaaacataagttttggatctaaactagtggattgggcatgttcgttgcgaaaaacgaagaaatggttccggtggaaaaaactcgtgctttgtatgcaccccgacacccgttttcggaatgggtgacgtgcggcaatgatatagcgcgaaacaaccccaaacatgagttttggacctaaagtagaagattgggcatgttcgttgcgaaaaacgaagaattggttccggtggcaaaaactcgtgcttcgtatgcacaccgacacccgttttggaaatgggtgacgtacgacaacgaaattgcgcgaaaccaccccacacatgagttttggacataaagtagtggattgggcatgttcattgcgaataacaaagaaatggttccggtagcgaaaactcatgctttgtatgcacccgacacccgtttccggaatgggtgacgtgcggcaatgatatagcgcgaaaccaccccaaacatgagttttggacctaaagtaaaggattgggcatgttcgttgcgaaaaaagaattggttccggtggcaaaaactcgtgctttgtatgcaccccgacacacgttttggaaatgggtgacgtacgacaacgaaattgcgcgaaaccaccccaaacatgagttttggacctaaagtagtggattgggcatgttcgttgcgaaaaacgaagaaatggttccggtggcaaaaactcgtgctttatgcaccccgacaaccgttttcggaatgggtgacgtgcagcaacgatatagcgcgaaaccaccccaaacatgagttttggacctaaagtagaggattgggaatgttcgttgcgaaaaacgaagaattggttccggtggcaaaaactcgtgctttgtatgcaccccgacacccgttttgggaatgggtgacgtacggcaacgaaattgcgcgaaaccactccaaacatgagttgtggacctaaagtagtggattgggcatgctcgttgcaaaaatcgaagaaatggttccggtggcgaaaactcgtgctttgtatgcaccccgacacctgttttcggaatgggtgacctgcggcaacgaaattgcgcgaaagcaccccaaacataagttttggatctaaactagtggattgggcatgttcgttgcgaaaaacgaagaaatggttccggtggaaaaaactcgtgctttgtatgcaccccgacacccgttttcggaatgggtgacgtgcggcaatgatatagcgcgaaacaaccccaaacatgagttttggacctaaagtagaggattgggcatgttcgttgcgaaaaacgaagaattggttccggtggcaaaaactcgtgctttgtatgcaccccgacacccgttttggaaatgggtgatgtacgacaacgaaattgcgcgaaaccaccccacacatgagttttggacataaagtagtggattgggcatgttcgttgcggaaaacgaagatatggttccggtggcgaaaactcatgctttgtatgcacccgacagtcgtttttggaatgggtgacgtgcgacaacgaaattgcgcgaaaccaccccaaacatgagtttttgacctaaagtagtggattgggcatgttcgttgagaaaaacgaagaaatggtttcggtggcaaaaagtcgtgctttgtatgcaccccgacacccgttttcggaatgtgtgacgtccggcaacgaaattgcgcgaaaccaccccaaatatgagtttttacctaaagtagtggattgggcatgttcgtagcgaaaaacgaagaattggttccggcggcgaaaactcgtactttgtatgcacccgacacccgttttcggaatggtgacgtgcggcaacgaaattgcacgaaaccaccccaaacattagttttggacctaaagtagtggattgggcatgttcgttacgnnnnnnnnnnnnnnnnnnnnnnnnnnnnnaactcatgctcacccgttttgtatggaccccgacacccgttttgtgaatgggtgacgtacgacaacgaaattgtgcgaaaccaccccaaacatgagttttggacctaaagtagtggattgggcatgttcgttgcgaaaaacgaagaaatggttccggtggcgaaaactcatgctcacccgttttcggaatgggtcacgtgcggcaacgaaattgcgtgaaaccaccccaaacatgagttttggacctaaagtagtggattgggcatgctcgttgcaaaaaacgaagaaatggttccggtggcaaaaactcgtgctttctatgcaccccgacacccgttttcggaatgggtgacgtgcggcaacaaaattgcgcgaaacgaccccaaacataagttttggacctaaagtagtggattgggcatgttcgttgcgaaaaacgaagaaatggttccggtggcaaaactcgtgctttgtatgcaccccgacacccgttttcggaatgggtgacgtgcgacaatgatatagcgcgaaacaaccccaaacatgagttttggtcctaaagtagatgattgggcatgttcgttgcgaaaaacgaagaattggttccggtggcaaaaactcgtgctttgtatgcaccccgacacccgttttggaaatgtgtgacgtacgacaacgaaattgcgcgaaaccaccccacacatgagttttggacctaaagtagtggattgggcatgttcgttgcgaataacaaagaaattggttccggtggcaaaaactcatgctttgtatgcacccgacacctgttttcggaatgggtgacgtgcggcaacgaaatttcgcgaaacaatcccaaacatgagttttggacctaaagtagtgtattgggcatgttcgttgcaaaaaacgaagaaatggttccggttgcaaaaactcgtgctttgtatgcaccccgacacccgttttcggaatgggtgacgtgcggcaacgatatagcgcgaaaccaccccaaacatgagttttggacctgaaatagaggattgggaatgttcgttgcgaaaaacgaagaattggttccggtggcgaaaactcgtgctttgtatgcaccctgacacccgttttcggaatgggtgacgtgcggcaatgatatagcgcgaaacaaccccaaacatgagttttggacctaaagaagacgattggacatgttcgttgcaaaaatcgaagaaatggttccggtggcgaaaactcgtgctttgtatgcacccaacacctgttttcggaatgggtgacgtgcggcaacgaaattgcgcgaaagcaccccaaacataagttttggacctaaagtagtggattgggcatgttcgttgcgaataacaaagaaatggttccggtggcaaaaactcgtgctttgtatgcaccccgacacccgttttcggaatgggtgacgtgcggcaatgatatagcgcgaaacaaccccaaacatgagttttggacctaaagtagaggattgggcatgttcgttgcaaaaaatgaagaattggttccggtggcaaaaactcgtgctttgtatgcaccccgacacccgttttggaaatgggtgacgtacgacaacgaaattgcgcgaaaccaccccacacatgagttttggacataaagtactggattgggcatgttcgttgcgaataacaaagaaatggttccggtggcgaaaactcatgctttgtatgcacccgacacccgttttcggaatgggtgacgtgcggcaatgatatagcgcgaaaccaccccaaacatgagttttggacctaaagtagaggattgggcatgttcgttgcgaaaaaagaattggttccggtagcaaaaactcgtgctttgtatgcaccccgacacccgttttggaaatgtgtgacgtgcggcaacgaaattgcgcggaaccaccccaaacatgagttttggacctaaagtagtggattgggcatgttcgttgcaaaaaacgaagaaatggttccggtggcgaaaactcgtgctttgtatgcaccccaacacccgttttcggaatgggtgacgtgcggcaacgaaattgcgcgaaaccaccccaaacatgagttttggacctaaagtagtggattgggcatgttcgttgcgaaaaacgaagaaatggttccggtggcaaaaactcgtgctttatgcaccccgacaaccgttttcggaatgggtgacgtgcagcaacgatatagcgcgaaaccaccccaaacatgagttttggacctaaagtagaggattgggaatgttcgttgcgaaaaacgaagaattggttccggtggcaaaaactcgtgctttgtatgcaccccgacacccgttttgggaatgggtgacgtacggcaacgaaattgcgtgaaaccactccaaacatgagttgtggacctaaagtagtggattgggcatgctcgttgcaaaaatcgaagaaatggttccgatggcgaaaactcgtgctttgtatgcaccccgacacctgttttcggaatgggtgacctgcggcaacgaaattgcgcgaaagcaccccaaacataagttttggatctaaactagtggattgggcatgttcgttgcgaaaaacgaagaaatggttccggtggaaaaaactcgtgctttgtatgcaccccgacacccgttttcggaatgggtgacgtgcggcaatgatatagcgcgaaacaaccccaaacatgagttttggacctaaagtagaagattgggcatgttcgttgcgaaaaacgaagaattggttccggtggcaaaaactcgtgcttcgtatgcacaccgacacccgttttggaaatgggtgacgtacgacaacgaaattgcgcgaaaccaccccacacatgagttttggacataaagtagtggattgggcatgttcattgcgaataacaaagaaatggttccggtagcgaaaactcatgctttgtatgcacccgacacccgtttccggaatgggtgacgtgcggcaatgatatagcgcgaaaccaccccaaacatgagttttggacctaaagtagaggattgggcatgttcgttgcgaaaaaagaattggttccggtggcaaaaactcgtgctttgtatgcaccccgacacacgttttggaaatgggtgacgtacgacaacgaaattgcgcgaaaccaccccaaacatgagttttggacctaaagtagtggattgggcatgttcgttgcgaaaaacgaagaaatggttccggtggcaaaaactcgtgctttatgcaccccgacaaccgttttcggaatgggtgacgtgcagcaacgatatagcgcgaaaccaccccaaacatgagttttggacctaaagtagaggattgggaatgttcgttgcgaaaaacgaagaattggttccggtggcaaaaactcgtgctttgtatgcaccccgacacccgttttgggaatgggtgacgtacggcaacgaaattgcgcgaaaccactccaaacatgagttgtggacctaaagtagtggattgggcatgctcgttgcaaaaatcgaagaaatggttccggtggcgaaaactcgtgctttgtatgcaccccgacacctgttttcggaatgggtgacgtgcggcaacgaaattgcgcgaaagcaccccaaacataagttttggatctaaactagtggattgggcatgttcgttgcgaaaaacgaagaaatggttccggtggaaaaaactcgtgctttgtatccgacacccgttttcggaatgggtgacgtgcggcaatgatatagcgcgaaacaaccccaaacatgagttttgtacctaaagtagaagattggtcatgttcgttgcgaaaaacgagaattggttccggtggcaaaaactcatgctttgtatgcaccccgacacccgttttgggaatgggtgacgtacggcaacgaaattgcgtgaaaccactccaaacatgagttgtggacctaaagtagtggattgggcatgctcgttgcaaaaatcgaagaaatggttccggtggcgaaaactcgtgctttgtatgcaccccgacacctgttttcggaatgggtgacctgcggcaacgaaattgcgcgaaagcaccccaaacataagttttggatctaaactagtggattgggcatgttcgttgcgaaaaacgaagaaatggttccggtggaaaaaactcgtgctttgtatgcaccccgacacccgttttcggaatgggtgacgtgcggcaatgatatagcgcgaaacaaccccaaacatgagttttggacctaaagtagaagattgggcatgttcgttgcgaaaaacgaagaattggttccggtggcaaaaactcgtgcttcgtatgcacaccgacacccgttttggaaatgggtgacgtacgacaacgaaattgcgcgaaaccaccccacacatgagttttggacataaagtagtggattgggcatgttcattgcgaataacaaagaaatggttccggtagcgaaaactcatgctttgtatgcacccgacacccgtttccggaatgggtgacgtgcggcaatgatatagcgcgaaaccaccccaaacatgagttttggacctaaagtagaagattgggcatgttcgttgcgaaaaaagaattggttccggtagcaaaaactcgtgctttgtatgcaccccgacacccgttttggaaatgtgtgacgtgcggcaacgaaattgcgcggaaccaccccaaacatgagttttggacctaaagtagtggattgggcatgttcgttgcaaaaaacgaagaaatggttccggtggcgaaaactcatgctttgtatgcaccccaacacccattttcggaatgggtgacgtgcggcaacgaaattacgcgaaaccaccccaaacatgagttttggacctaaagtagtggattgggcatgttcgttgcgaaaagcgtaaaatggttccggtggcaaaaactcgtgctttgtatgcaccccgacacccgttttcggaatgggtaacgtgcgacaacgatatagcgcgaaaccaccccaaacatgagttttggacctaaagtagaggattggtgatgtgcacccgttgggtgattgcccgatctttcgatgagagggtgtggaataagtcgattgggggaggagacgacgtcacggcccgactacaaccttccaaagacgctgcgccttagcaaccgatacaccacctcctatggctgtcacgatcttgtggagcgtgacaccctggccactagggcactcgttctgcgagcaatcgaagaactagcaagaacaagtagaacaattactgaattatcagatctaaatgtaggtttcaaaatcaaactccaatatggtggggttcctgatgtgcacccgttgggtgattgcccgatctttcgatgagagggtgtggaataactcgattgggggaggagacgacgttcacggcccgactacagccttccaaagacgctgcgccttagcaaccgatacaccacctcctatggctgtcacgatcttgtggagcgtgacaccctggccactagggcactcgtcctgcaagcaatcgaagaactagcaagaacaagtagaacaagtactgaattaccagatctaaatgtaggtttcaaagtcaaactccaatatggtggggttccgaagacaagaagacgggcggctgaactagcacgcgcgcttgcaagcaagtagcgagagctaaacttgatctaaacaaaacccgctgttcttggtggcggctagggggtttataaacatgggaggacgaccacaagggtattggggtcgtgctgcaaccctaggatgcgtccctaatggacctaacttgatacacgacccattgggccaaaatagggtgacgcagcaccatgggcagaaaaggcaggaaatgtctcggtaagaaaacaatgattacggcggcctcagaacagatatgactataattccggatccatatgaaagtagacttgataagctttccatgttgtgcttgaacattccaatccgagcccgcatctgaccgtggtgaccgtcacaagttggtgttcttctgcagtccgaatccagcatgttcaaatccttttccctttcggtcttctccctgattcctaagcaaaacaagagtgcacgggtc

SEQ ID NO: 436 - DNA, 17157 bp, Zea mays
  source (0)...(0): Zea mays BAC clone full insert sequence contig bacm.pk024.f21.fis40
  misc_feature (1)...(17157): n = A,T,C or G
ttgagccattgaatgtgatatagatgtgggtgcggtttggtcgtaagtgcaagcttctccaccatgtcgctgctagccaagttgttgcagctacctccatcaatgatcaaacgacatgaacgctccttaatgacacactttgtttgaaacaatgtatgtcgctgattctgctctgccttctccatttgtgcactaagcacacgctgtacaatgaggctctcataatgctctgcatcatctgcaccaatctgttcttcgggtggttccttagtgcctgcatcatcagccgcaagcaaagcaagtgtagcttcatccaaatcactagcagaagaatacccaccatcgtcttttaccaccaaaacacgctgattaggacaatcacgctgcacgtgtccatagcccttgcatcgataacacagaacatctcttgttctacccgtggaggctactgaagaggcactacctgctggtttctgggcagatttggttgctgaatttgtggaagatgcacgtggtttgtcgccggaggaaggcgggggtgctggtcgacttggcgagggagttggtgctagtgtacgaccggtcatggacgtagtcgtgcgctgttgccatggtgtagattttcctgcagaaacattagaccttgcactagcacgtcgtccctgcacttccctttcagctttgcaagcaagatgaaacaatcgggttacattagcataatctttataagcaaggatgtcctgaatttccctatttaacccgcccaaaaatctagccatagcagattcctcaccctcctctatgttacaacgcagcatacccatttgtaattcctgataatattcttctacacttttagtaccctgtctcaattgttgcaacttgtttaacatatcacgtgcataataagaaggaacaaatctagcccgcatgacccgtttcaacgcatcccaagtttgtggcatgttattaggattcttcttaccatgttctatccaccagacagaagcaaaatcagtaaactcactagtagcagctctaacccgcgcattctcaggaaattcatggcatgcaaacttttgatcaaccgcaatctcccaagtaatgtaagcatcagggtcatatttaccatcaaaaggaggtattttaaatttaaccttactaaaagcatcatcattaccatgtacctcacgtcggcgaaaaccacccatacctctacggttagtacgtagtcgccggcgattaggtgcttcttggtcatcttgttcagtatcagcaacatagtcatcccagttaccttcggcgccctcatcacgcccaccattgatattagcatgcatctcatcaaaccgcctcaagagtgcgacaaggctcttgtcaatatgagcaactgccatttccacatttgcaagtttggtgtttgtgtcgatctgtgtggcctccaattgccccatcttttcattcgtcacctgcatgtcattatcaagaccttccgtgtgcgtcttcaccagccttacaaagtgttgtatgatacccttggtgcgaggagagtgtggcatattacgagaagcatcatcaacctccaatcctgccatggttagacgaacagaggcaacaagaaaaaaaacgtgaaggaataaaaactctacaactattaggatgtagctactgcaaggcgctcactctcaacctgccacacaagctcttaccaattcttaccttgcacaacaggaggggtcagcaaccaacaagtctgcaaccgtggaataagtgtatcggtgccacagcaacacgacctgtcaaactgtagtcgaaatatgtagagttgtaggtgggctgaagcaaggaatacactagtaccacgttagttacaaaagcaagctgaataatcgttcaacggtggtactgtgctggtcctaggctaaaccaggctagagacgtgagcctaggcacaaaggtagtcactgaaaaagaacaactagcacagcacaaagagaaacaacagatttagagattcagcccccttcttcttcttttccttttttttttcttttctattctttttttttcttcttcttctgttttttttttgcaggggcctaaaccctttttttttcactatgacaacccaaacaataaagatattgctaacaacccctttaaatcagatttaacaaatcttgttaatatagaaagtccagaaatctctacgatgattgcggagcgctcagaacgaattttgagataaggtcagatccgttggaaagaagataagataagctttccagattgtatttaaacttccaaatcggatatgatatgtatccgtggtggcaaaaacgaaccagagatgtttttggtgatggtggatttcgtggtgaccaaaacgtggtagaactcaaaactctaaaggaataaactaagaccagcaactcgacacaaccgatgcaaccaaaaactcaacaagccctaactaagtagtactagtaaatgctcaatggtttataggattgcggtaaaactaatctactattttttggctttttctggactataggagataagaaaacagcgaagaaaagtaaatctctcaccgataaaccttgctctgataccaactgatgtgcacccgttgggtgattgcccgatctttcgatgagagggtgtggaataactcgattgggggaggagacgacgttcacggcccgactacagccttccaaagacgctgcgccttagcaaccgatacaccacctcctatggctgtcacgatcttgtggagcgtgacaccctggccactagggcactcgtcctgcaagcaatcgaagaactagcaagaacaagtagaacaagtactgaattaccagatctaaatgtaggtttcaaagtcaaactccaatatggtggggttccgaagacaagaagacgggcggctgaactagcacgcgcgcttgcaagcaagtagcgagagctaaacttgatctaaacaaaacccgctgttcttggtggcggctagggggtttataaacatgggaggacgaccacaagggtattggggtcgtgctgcaaccctaggatgcgtccctaatggacctaacttgatacacgacccattgggccaaaatagggtgacgcagcaccatgggcagaaaaggcaggaaatgtctcggtaagaaaacaatgattacggcggcctcagaacagatatgactataattccggatccatatgaaagtagacttgataagctttccatgttgtgcttgaacattccaatccgagcccgcatctgaccgtggtgaccgtcacaagttggtgttcttctgcagtccgaatccaacatgttcaaatccttttccctttcggtcttctccctgattcctaagcaaaacaagagtgcacgggtctccatggtctaaatatgatggacatgaactcaagagtgtaatcacctgatggttgagttgacgagcacgagcgcgagtaatgggaccagaaattggtacttgtattggtatagatgcatcagtagtgtggatgtcttcatcaagcatgcccaatccactactttaggtccaaaactcatgtttggggtggtttcgcgcaatttcgttgccgcacgtcacccattccgaaaacgggtgagcatgagttttcgccaccggaaccatttcttcgtttttcacaacgaacatgcccaatccactactttaggtccaaaactcatgtttggggtggtttcgcacaatttcgttgtcgtacgtcacccattcccaaaacgggtgtcgtggtgcatacaaagcaagagtttttaccaccggaaccaattcttcgttattcgcaacgaacatgtccaaaactcatgtttggggtggtttcgcgctacatcgttgccgcacgtcacccattccgaaaacaggtgtcgggtgcaaacaaagcatgagttttcgccaccggaaccatttctttgttattcgcaacgaacatgcccaatccactactttaggtccaaaactcatgtgtggggtggtttcgctcaatttcattgtcgtatgtcacccatttccaaaacgggtgtcggggtgcatacaaagcacgagtttttgccaccggaaccaattcttcgtttttcgcaacgaacatgcccaatcctctactttaggtccaaaactcatgtttggggttctttcgcgctatatcattgccgcacgtcacccattccgaaaacgagtgtcggggtggatacaaagcacgcgtttttgccaccggaaccatttcttcgtttttcgcaacgaacatgcccaatccactactttaggtccaaaactcatgtgttggggtggtttcgcacaatttcgttgtcgtacgtcacccattcccaaaacgggtgtcggggtgcatacaaagcttttttgccaccggaaccaattcttcgtttttcgcaacgaacatgctcaatcctctactttaggtccaaactcatgtttggggtggtttcgcgctacatcgttgccgcacgtcacccattccgaaaacgggtgtcggggtgcatacaaagcacgagtttttgctatcgaaaccatttctttgtttttcgcaactaacatgcccaatccactactttaggtccaaaactcatgtttgggttggtttcgcgcaatttcgttgtcgcacgtcacccattccgaaaacgggtgtcggggtgcatacaaagcacgagttttcgccgccggaaccaattcttcgtttttcgcaacgaacatgcccaatccactactttaggtccaaactcatatttggggtggttttgcgcaatttcgttgccggacgtcacacattccaaaaacgggtgtcggggtgcatacaaagcactagtttttgacaccggaaccatttcttcgtttttcgcaacgaacatgcccaatccactactttaggtccaaaactcatgtttggggttgtttcgcgctatatcattgccgcacgtcacccattccgaaaacgggtgtcggggtgcatacaaagcacgagtttttttgctatcgaaaccatttctttgtttttcgcaacgaacatgcccaatccactactttaggtccaaaactcatgtttggggtggtttcgcgcaatttcgttgccgcacgtcacccattcagaaaacgggtgagcatgagttttcgccaccggaaccatttcttcgtttttcgcaacgaacatgcccaatccactactttaggtccaaaactcatgtttggggtggtttcgcacaatttcgttgtcgtacgtcacccattcccaaaacgggtgtcggggtgcatacaaagcacgagttttcgccaccggaaccaattcttcgtttttcgcaacgaatattcccaatcctctacttcaggtccaaaactcatgtttggggtggttccgcgcaatttcgttgccgcacgtcacacattccgaaaacgggtgtcgggtgcatacaaagcacgatttttcgccaccggaaccatttcttcgttttttgcaacgaacatgcccaatctactcctttaggtccaaaactcatgtttggggtggtttcgcgaaatttcgttgccgcacgtaacccattccgaaaacaggtgtcgggtgcatacaaagcatgagttttcgccaccggaaccatttctttgttattcgcaactaacatgcctaatccactactttatgtccaaaactcatgtgtggggtggtttcgcgcaatttcgttgtcgtacgtcacccatttccaaaacgggtgtcggcgtgcatacaaagcacgagtttttgccaccggaaccaattcttcgtttttcgcaacgaacattcccaatcctctactttaggtccaaaaatcatgtttggggttgtttcgcgctatatcattgctgcacgtcacccattccggaaacgggtgtcggggtgcatacaaagcacaagtttttgccaccggaaccatttcttcgttttttgcaacaaacatgcccaatccactactttaggtccaaaacttaagtttggggtggtttcgtgcaatttcgttgccgcacgtcacccattccgaaaacgggtgtcggggtgcatacaaagcacaagttttcaccaccggaaccatttcttcgttttttgcaacgagcatgcccaatccactactttaggtccaaaactcatgtttggggtggtttcgcgcaatttcgttgccgcacgtcacccattccgaaaacgggtgagcatgagttttcgccaccggaaccatttcttcgtttttcgcaacgaacatgcccaatccactactttaggtccaaaactcatgtttggggtggtttcgcacaatttcgttgtcgtacgtcacccattcccaaaacgggtgtcggggtgcatacaaagcaagagtttttaccaccggaaccaattcttcgttattcgcaacgaacatgtccaaaactcatgtttggggtggtttcgcgctacatcgttgccgcacgtcacccattccgaaaacaggtgtcgggtgcaaacaaagcatgagttttcgccaccggaaccatttctttgttattcgcaacgaacatgcccaatccactactttaggtccaaaactcatgtgtggggtggtttcgctcaatttcattgtcgtatgtcacccatttccaaaacgggtgtcggggtgcatacaaagcacgagtttttttgctatcgaaaccatttctttgtttttcgcaacgaacatgcccaatccactactttaggtccaaaactcatgtttggggtggtttcgcgcaatttcgttgccgcacgtcacccattccgaaaacgggtgagcatgagttttcgccaccggaaccatttcttcgtttttcgcaacgaacatgcccaatccactactttaggtccaaaactcatgtttggggtggtttcgcacaatttcgttgtcgtacgtcacccattcccaaaacgggtgtcggggtgcatacaaagcaagagtttttgccaccggaaccaattcttcgtttttcgcaacgaacatgctcaatcctctactttaggtccaaaactcatgttggtgtggtttcgcgctacatcgttgccgcacgtcacccattccgtaaacgggtgtcggggtgcatacaaagcacgagttttgcccatcgaaaccatttcttcgtttttcgcaacgaacatgcccaatccactactttaggtccaaaactcatgtttggggtggttttgcgcaatttcgttgctgtacgtcacccatttccaaaacgggtgtcggggtgtgatgaggacatcctccactattacccgttggcaaagacgcaattggcccagttggcccaattgtagtcggatgacgaccgtgtgagcctcagaattatcccacctcgcttaacttgggaggaggaagccactttaaaagggagagccacccttcccccattggactagtcttttggggcgattgggtcttttatgaagacatccacactactgatacatctatgccaatacaagtaccaatttctggtcccattactcgcgctcgtgctcgtcaactcaaccatcaggtgattacactcttgagttcatgtccatcatatttagaccatggagacccgtgcactcttgttttgcttaggaaccagggagaagaccgaaagggaaaaggatttgaacatgctggattcggactgcagaagaacaccaacttgtgacggtcaccacggtcagatgcgggctcggattggaatgttcaagcacaacatggaatgcttatcaagtctactttcatatggatccggaattatagtcatatctgttctgaggccgccgtaatcattgttttcttaccgagacatttcctgccttttctgcccatggtgctgcgtcaccctattttggcctaatgggtcgtgtatcaagttaggtccattagggacgcatcctagggttgcagcacgaccccaatacccttgtggttgtccttccatgtttataaaccccctagccgcaaccaagaacagcgggttttgtttagatcaagtttagctctcgctacttgcttgtaagcgcgcgtgctggttcagccgcccgtcttcttgtcttcggaaccccaccatattggagtttgattttgaaacctacatttagatctggtattcagtacttgttctacttgttcttgctagttcttcgattgcttgcaggacgagtgccctagtggccagggtgtcacactccacaagatcgtgacagccataggaggtggtgtatcggttgctaaggcgcagcgtctttggaaggctatagtcgggccgtgaacgtcgtctcctcccccaatcgagttattccacaccctctcatcgaaagatcgggcaatcacccaacgggtgcacatcagttggtaatcagagcaaggtttatcggtgagagatttacttttcttcgctgttttcttatctcctatagtccagaaaaagccaaaaaatagtagattagttttaccgcaatcctataaaccattgagcatttactagtactacttagttagggcttgttgagtttttggttgcatcggttgtgtcgagttgctggtcttagtttattcctttagagttttgagttctaccacgttttggtcaccacgagatccaccatcaccataaactgaccatttgttgggcctcggccaaccccacctgggctcggtgtatcagggtgcatacaaagcacgagttttcgccaccggaaccaattcttcatttttcgcaacgaacattcccaatcctctactttaggtccaaaactcatgtttggggtggtttcgcgctatatcgttgccgcacgtcacccattccgaaaacgggtgtcggggtgcatacaaagcacgagttttggccaccggaaccatttcttcgtttttcacaacgaacatgcccaatacactactttaggtccaaaactcatgtttggggttgtttcgcgaaatttcgttgccgcacgtcacccattccgaaaacatgtgtcgggtgcatacaaagcatgagtattcgccaccggaaccatttctttgttattcgcaacgaacatgcccaatccactactttaggtccaaaactcatgtgtggggtggtttcgctcaatttcgttgtcgtacgtcacccatttccaaaacgggtgtcgaggtgcatacaaagcacgagtttttgccaccggaaccaattcttcgtttttcgcaacgaacatgcccaatcctctactttaggtccaaaactcatgtttggggttgtttcgcgctataacattgacgcacgtcacccattccgaaaacgggtgtcggggtgcatacaaagcacgagtttttgccaccggaaccatttcttcgtttttcgcaacgaacatgcccaatccactactttaggtccaaaacttatgtttggggtggttttgcgcaatttcgttgccgcacgtcacccattccgaaaacgggtgtcgaggtgcatacaaagcacgagtttttgccaccggaaccatttcttcgttttttgcaacgagcatgcccaatccactactttaggtccaaaactcatgtttggggtggtttcgcgcaatttcgttgccgcacgtcacccattccgaaaacgggtgtcggggtgtgttttcgccaccggaaccatttcttcgtttttcgcaacgaacatgcccaatccactactttaggtccaaaactcatgtttggggtggtttcgcataatttcgttgtcgtacgtcacccattcccacaacgggttgttcggggtgcatacaaagcaagagtttttgccaccgagaccaattcttcgtttttcgcaacgaacatgctcaatcctctactttaggtccaaaactcatgtttggggtggtttcgcgctacatcgttgccgcacgtcacccattccgaaaacgggtgtgatgaagacatccacactactgatacatctatgccaatacaagtaccaatttctggtcccattactcgcgctcgtgctcgtcaactcaaccatcaggtgattacactcttgagttcatgtccatcttatttagaccatagagacccgtgcactcttgttttgcttaggaaccagggagaagaccgaaagggaaaaggatttgaacatgctggattcggactgcagaagaacaccaacttgtgacggtcaccacggtcagatgcgggctcggattggaatgttcaagcacaacatggaaagcttatcaagtctactttcatatggatccggaattatagtcatatctgttctgaggccgccgtaatcattgttttcttaccgtgatattttctgccttttctgcccatggtgctgcgtcaccctattttggcccaatgggtcgtgtatcaagttaggtccattagggacgcatcctagggttgcagcacgaccccaatacccttgtggtcgtcctcccatgtttatagaccccctagtcgccaccaagaacagcgggttttgtttagatcaagtttagctctcgctacttgcttgcaagcgcgcgtgctagttcagccgcccgtcttcttgtcttcggaaccccaccatattggagtttgattctgaaacctacatttagatctggtaattcagtacttgttctacttgttcttgctagttcttcgattgcttgcaggacgagtgccctagtggccagggtgtcacgctccacaagatcgtgacagccataggaggtggtgtatcggttgctaaggcgcagcgtctttggaaggctgtagtcgggccgtgaacgtcgtctcctcccccaatcgagttattccacaccctctcatcgaaagatcgggcaatcacccaacgggtgcacatcagggtgtcggggtgcatacaaagaacgagtttttgccaccggaacgagttttcgcaacgaacatgcccaatacactactttaggtccaaaactcatgtttggggttgtttcgcgaaatttcgttgccgcacgtcacccattccgaaaacaggtgtcgggtgcaaacaaagcatgagttttcgccaccggaaccatttctttgttattcgcaacgaacatgcccaatccagtactttaggtccaaaactcatgtgtggggtggtttcgctcaatttcgttgtcgtacgtcacccatttccaaaatgggtgtcggggtgcatacaaagcacgagtttttgccaccgaaaccaattcttcgttttttgcaacgaacatgcccaatcctctactttaggtccaaaactcatgtttggggttgtttcgcgctacatcattgccgcacgtcacccattccgaaaacgggtgtcggggtgcataaaaagcacgagtttttgccaccggaaccatttcttcgtttttcgcaacgaatatgcccaatccactactttaggtccaaaacttatgtttggggtggtttcgcgcaatttcgttgccgcacgtcacccattccgaaaacgggtgtcggggtgcatacaaagcatgagtttttgccaccggaaccatttcttcgttttttgcaacgagcatgcccaatccactactttaggtccaaatcttatgtttggggtggtttcgggcaatttcgttgccgcacgtcacccattccgaaaacgggtgtcggggtgcatacaaagcacgagttnnnnnnnnnnnnnnnnnnnnnnnnnnnnncgcaatgaacatgcccaatccactactttaggtccaaaactcatgtttggggtggtttcgcgcaatttcattgccgcacgtcacccattccgaaaacgggtgtcagggtgcctacaaagcacgagttttcgccgccggaaccaattcttcgtttttcgcaacgaacatgcccaatccactactttaggtaaaaactcatatttggggtggtttcgcgcaatttcgttgccggacgtcacacattccgaaaatgggtgtcggggtgcatacaaagcacgactttttgccaccggaaccatttcttcgtttttcgcaatgaacctgcccaatccactactttaggtccaaaagtcatgtttggggtgttttcgcgcaatttcgttgtcgtacgtcacccattcccaaaacgagtgtcggggtgcatacaaagcacgagttttcgccactggaaccaattcttcgtttttcgcaacgaacatgcccaatccactacttttggtaaaaactcatatttggggtggtttcgcgcaatttcgttgcgggacgtcacacattccgaaaacgggtgtcggggtgcatacaaagcacgagtttttgacaccggaaccatttcttcgtttttcgcaacgaacatgcccaatccactactttaggtccaaaactcatgtttggggtggtttcgcacaatttcgttgccgcacgtcacccattccgaaaacgggtgtcggggtgcatacaaagcatgagtttttgccaccggaaccatttcttcgttttttgcaacgagcatgcccaatccactactttaggtccaaaacttatgtttggggtggttttgcgcaatttcgttgccgcacgtcacccattccgaaaacgagtgtcggggtgcatacaaagcacgagtttttgccaccggaaccatttcttcgtttttcgcaacgaacatgcccaatacactactttaggtaaaaactcatatttggggtggtttcgcgcaatttcgttgcgggacgtcacacattccgaaaacgggtgtcggggtgcatacaaagcacgagtttttgacaccggaaccatttcttcgtttttcgcaacgaacatgcccaattccactactttaggtccaaaactcatgtttggggtggtttcgcacaatttcgttgctgcacgtcacccattccgaaaacgggtgtcgggtgcatacaaagcatgagttttcgccaccggaaccatttcttcgttttccgcaacgaacatgcccaatccactactttaggtccaaaactcatgtttgggtggtttcgcgcaatttcgttgtcgtacgtcacccattcccaaaacgggtgtcggggtgcatacaaagcaagagtttttgccaccggaaccaattcttcgtttttcgcaacgaacatgctcaatcctctactttaggtccaaaactcatgtttggggtggtttcgcgctacatcgttgccgcacgaaacccattccgaaaacgggtgtcggggtgcatacaaagcacgagtttttgccaccggaacaatttcttcgtttttcgcaacgaacatgcccaatacactactttaggtccaaaactcatgtttggggttgtttcgcgaaatttcgttgccgcacgtcacccattccgaaaacaggtgtcgggtgcatacaaagaatgagttttagccaccggaaccatttctttgttattcacaacgaacatgcccaatccactactttaggtccaaaactcatgtgatggggtggtttcgctcaatttcgttgtcgtacgtcacccatttccaaaacgggtgtcggggtgcatacaaagcacgagtttttgccaccggaaccaattcttcgtttttcgcaacgaacatgcccaatcctctactttaggtccaaaactcatgtttggggttgtttcgcgctatatcattgccgcacgtcacccattccgaaaaggggtgtcggggtgcatacaaagcacgagtttttgccaccagaaccatttcttcgtttttcacaatgagcatgcccaatccactaatttaggtcgaaaacttatgtttggggtggtttcgcgcaatttcattggcgcacgtcacccattccgaaaacgggtgtcggggtgcatacaaagcacgagtttttgccaccggaaccatttcttcgttttttgcaacgagcatgcccaatccactactttaggtccaaaactcatgtttggggtggtttcgcgcaatttcgttgccgcacgtcacccattccgaaaacgggtgagcatgagttttttccaccggaaccatttcttcgtttttcgcaacgaacatgcctaatcctctactttaggtcaaaaactcatgtttggggtggtttcgcgcaatttcgttgtcgtacgtcacccattcccaaaacgggtgttggggtgcatacaaagcacgagtttttgccaccggaaccaattcttcgtttttcgtaacgaacatgcccaatcctctacttcaggtccaaaactcatgtttggggtggtttcgcgctacatcgttgccgcacgtcacccattccgaaaacgggtgtcgaggtgcatacaaagcacgagtttttgctatcaaaaccatttctttgtttttcgcaacgaacatgcccaatccactactttaggtccaaaactcatgtttggggtggtttcgcgcaatttcgttgccgcacttcacccattccgaaaacgggtgtcggggtgcatacaaagcacgagttttcgccgccggaaccaattcttcgtttttcgccacgaacatgcccaatccactactttaggtaaaaactcatatttggggtggtttcgcgcaatttcgttgccggacgtcacacattccgaaacgggtgtcggtacaaagcacgactttttgccaccggaaccatttcttcgtttttcgcaacgaacatgcccagtccactactttaggtccaaaactcacgtttggggtggtttcgcgcaattttgttgtcgcacgtcacccattccgaaaacgactgtcgggtgcatacaaagcatgagttttcgccaccggaaccatgtcttcgttttccgcaacgaacatgcccagtccactactttaggtccaaaactcatgtttggggtggtttcacgcaatttcgttgccgtacgtcacccattcccaaaacgggtgtcggggtgcatacaaagcacgagttttcgccaccggaaccaattcttcgtttttcgcaacgaacatgcccaatccactactttaggtaaaaactcatatttggggtggtttcgcgcaatttcgttgcgggacgtcacacattccgaaaacggttgtcggggtgcatacaaagcactagtttttgacaccggaaccatttcttcgtttttcgcaacgaacatgcccaatccactactttaggtccaaaactcatgtttggggtggtttcgcacaatttcgttgccgcacgtcacccattccgaaaacgggtgtcgggtgcatacaaagcatgagttttcgccaccagaaccatttcttcgttttccgcaacgaacatgcccaatccactactttaggtccaaaactcatgtttggggtggtttcgcgcaatttcgttgtcgtacgtctcccattcccaaaacgggtgtcggggtgcatacaaagcacgagtttttgccaccggaaccaattcttcgtttttcgcaacgaacatgcccaatcctctactttaggtccaaaactcatgtttggcgtggtttcgcacaatttcgttgtcgtacgtcacccattctcaaaacgggtgtcggggtgcatacaaagcaagagttttttccaccggaaccaattcttcgtttttcgcaacgaacacgctcaatcctctactttaggtccaaaactcatgtttgggttggtttcgcgctacatcgttgccgcacgtcacccattccgaaaacgggtgtcggggtgcatacaaagcacgagttnnnnnnnnnnnnnnnnnnnnnnnnnnnnncgcaacgaacatgcccggtccaaaactcatgtttggggtggtttcgcgcaatttcgttgccgcacttcacccattccgaaaaggggtgtcggggtgcatacaaagcacgagttttcgccgccggaaccaattcttcgtttttcgccacgaacatgcccaatccactactttaggtaaaaactcatattttgggtggtttcgcgcaatttcgttgccggacgtcacacattccgaaacgggtgtcggtacaaagcacgactttttgccaccggaaccatttcttcgtttttcgcaacgaacatgcccagtccactactttaggtccaaaactcatgtttggggtggtttcgcgcaatttcgttgtcgcacgtcacccattccgaaaacgactgtcaggtgcatacaaagcatgagttttcgccaccggacgttttccgcaacgaacatgcccagtccactactttaggtccaaaactcatgtttggggatgatgcggacatcaacaccaacacgagcacatctacaccagcagcaccttctccagcccaggcgccaccccttccacctgggccagtgactcgggcccgtgcaagagaattgaactacatcatgttgttaaagaacgaaggcccggaagaatagacgaccagcccaattgcggcccataatggacgacctagggttggccgcccctaggggctgcgccccctctctatttattcaggagctgcgcctcctttatttcctgagttttgttttacgttagccttagctactctcgaacacgcgcaaatctgcgctgtcttcgtgtattcagaactccaccctcgagtaatagattagattgctcgcatcttgttcttgttcgttcttcgattgcgcacaggaaacgatcttcgtgatcaggccgatctcgcatcagcaaggtcggtaaccacagggagttggttcagcgattgcattggcgcctcgggcttgctcgtcgtagtcggatcgcaagggtcatcttccaccaaatcggaattatctctactcgccgaaagatcgggcacctcagctacatcaattggtatcagatttccaggttgatcggtgagtttatcgagcgttttttttcctacagtccacaaaaccgcataaaaattcaggttagatcttatcccagcacccttttgagcctcgcactttctttcaataatctgcattgttgaatttgtgtgctttcgcgtcatttgttgctggttgcattgtgttcttccaccattcaaaccctagcgccgccaccatcttccgtttgatcacgccacaaaccgagtcaacattgtttccttgtttttctccttcggttacgtcaaaaaaaaacagaaaaaaacaaaccgagtcaacggccgtttccttgattatcaggta

SEQ ID NO: 437 - DNA, 717 bp, Zea mays
  source (0)...(0): Zea mays BAC clone full insert sequence contig bacm.pk155.l13.fis1
  misc_feature (1)...(717): n = A,T,C or G
atccnnnnnnnnnnnnnnnnnnnnnnnnnnnnnnnnnnnnnnnnnnnnnnnnnnnnnnnnnnnnnnnnnnnnnnnnnnnnnnnnnnnnnnnnnnnnnnnnnttgggcatgtccgttgcgaaaaacgaagaaattgatcctgtggcaaaaactcgttctttgtatgcaccccgacacccgtttttggattgggttacatgtggcaacgaaattgcgcgaaaccacgccaaacatgagttttggacctaaagtagtggattgagaatgttcgttgcgaaaaacaaagaaatggttccggtggcataaactcgtgcttgtatgcaccccgacacccattttcggaaatgggtgacgtgcgacaacgaaattgtgcgaaacacccccaacatgagttttggactaaattagtgggatgggcttgttggttgcgaaaacgaagaaatggttccggtggcaaaactcgtgcttgtacgcaccccgacaccccgttttcggaaatgggggacatgcgggcaacaaatttcccgaaaaccccccccaacagggttttttggacccaaaaaattggattggggaaattttttttcaaaaaaaaaaaaaaaattaccctgggggcaaaaaattgggctttttagaccccccaacaccccttttcaaaaaggaaaaaatggcgccacaaaaatttggggaaaaaccccccaaaaagttttttgtggcg

SEQ ID NO: 438 - DNA, 773 bp, Zea mays
  source (0)...(0): Zea mays BAC clone full insert sequence contig bacm.pk155.l13.fis2
  misc_feature (1)...(773): n = A,T,C or G
gacggcgaaacgactcctatagggcgaagtgggtatttttatgcttgnnnnnnnnnnnnnnnnnnnnnnnnnnnnntgtgggacctaaagtaatggattaggcatgttcgttgcgaaaaacgaagaaatggttccagtggcaaaaactcgtgctttgtatgcaccccgacacccatttcgaaataagtgacgtgcggcaacgaaattgcgcaaaaccatccccaacattagttttggacctaaagtagtggattaggcatgttcgttgcgaaaaacgaagaaatggttctggtggcaaaaactcgtgctttgtatgcaccccgacacccgttttcgaaatgggtgacgtgcggcaacgaaattgcgcgaaaccaccccaaacatgagttttggacctaaagtagtggattgggcatgttcgttgcgaaaaacgaagaaatggttccggtggcaaaaactcatgctttgaatgcaatccaacacccattttcggaatgggtgacgtgcggcaacgaaattgcgcgaaaccaccccaaacatgagttttggacctaaattagtggattgggcatgttcgttgcgaaaaacgaagaatggttccggtggcaaaaactcgcgctttgtatgccccgcgacacctgttttcagaatgggtgacgtgcggcaacaaaatgcgcgaaaccccccaaactgagttttgaacctaattactgaattgggcatggtcgttgcaaaaaagaaaaatggttcgggtggcaaaactcggctttggg

SEQ ID NO: 439 - DNA, 558 bp, Zea mays
  source (0)...(0): Zea mays BAC clone full insert sequence contig bacm.pk155.l13.fis3
  misc_feature (1)...(558): n = A,T,C or G
gccgtatagactcctatcgggcgaatgggaccatacaaaaggcgaggtcgacggnatcgttaccttgatagcgacaaccacaaaaatgctatccctccccttcttagttctaggcaatcccaaaacaaaatccatcgaaatatcaatccaaggggaagtaggaacaggcaaaggcatatacaaaccatggttgttcaaccgtgacttagctttctgacaagtagtgcagcgtgcaacaaggcgctcaacatcagcgcgcatccgaggccaaaagaagtgggcagccaacacctcatgtgtcttgtagacgccaaagtgccccatgagaccgccctccatgtgcttccctgtaacaaccaaaagacgaacccgagctaagctgggaaacacaccgctttggttagccgcgaaaacaaggaaaccccatcccgggaagggtgaaaaatttgcccccaataggttttccccattttaataccaaaggggcccgaaaaaaccatctttttaaaaaaaacgggcattccgtcaaaaaaattatttggaacccttttttaaaac

SEQ ID NO: 440 - DNA, 777 bp, Zea mays
  source (0)...(0): Zea mays BAC clone full insert sequence contig bacm.pk155.l13.fis4
  misc_feature (1)...(777): n = A,T,C or G
accagcgcgattacctcctaagggacaacttccgacgcgnnnnnnnnnnnnnnnnnnnnnnnnnnnnnnnnnnnnnnnnnnnnnnnnnnnnngtgctttgtatgcaccgcgacacccgttttcggaatgcgtgacgtgcggcaacgaaattgcgcgaaaccaccccaaacatgagttttagacctaaagtagtggattgagaatgttcgttgcgaaaaacgaagaaatggttccggtggcaaaaactcgtgctttgtatgcaccgcgacacccgttttcggaatgggtgacgtgcgacaacgaaattgcgcgaaaccaccccaaacatgagttttggacctaaattactggattgggcatattcgttgcgaaaaacgaagaaatggttccggtggcaaaaactcgtgctttgtatgcaccccgacaccctttttcggaaagggtgacgtgcggcaacgaaattgcgcgaaaccgacctgagtttgtgtatctaaactantggattgggcatgttcgttgccgtaaacaaacaaatggatctggtggcaaagactcgtgcttgtatgtacctcgacacccgttttcggtattgggtgacgtggcgaccacgaaattgcgcgtaaccaccccccaacccgatttttggacctaaagtaatggattgggaatggttcgttgcgaaaaaccaaaaaatggatccgggtggcaaaaactcaagcttggtttgacccccgacacccccttccctaattggggaaggggcgaaaaacaaaaata

SEQ ID NO: 441 - DNA, 784 bp, Zea mays
  source (0)...(0): Zea mays BAC clone full insert sequence contig bacm.pk155.l13.fis5
  misc_feature (1)...(784): n = A,T,C or G
ggcgaaacgactcctatcaggggagtggcgagtttccattgctcgaggtcgacggnatcgtgacaaaagatgcgaagaaatgattctggtggcaaaaactcgtgctttgtatgcacagcgacacccgttttcggaatgagtgacgtgcggcaacgaaattgcgcgaaaccaccccaaacattagttttgtacctaaagtagtggattgggcatgttcgttgtgaaaaacgaagaaatggttccggtggcaaaaactcgtgcttgtatgcaccccgacacccattttcggaatgggtgacgtgcggcaacgaaattgcgcgaaaccaccccaaacatgagttttggacctaaagtagtggattgggcatgttcgttgcgaaaaacgaagaaatagttccggtggcaaaaactcntgcttgtatgcaccccgacacctgttttcggaatgggtgacgtgtgacaaccaaattgcgctgaaaccaccccaaacatgtgttttggcctcaagtagtggattgagaatatttcttgcgaaaaacaaagtaaatggtcccggggcaaaaactcgttctttggatgcaccccgacacccgcttttcgaaaggggtgacgggcggcaaccaaaatgtgcgaaaccaccccaaacatgtgtttttgggcccaaaagaatggattgtggctgttccttgttaaaaaaaaaaaaaatgtttccgggggcaaaaaaccctgctttttaagcccccccaacccccttttttgaaaggagggacgggggacaacaaaa

SEQ ID NO: 442 - DNA, 766 bp, Zea mays
  source (0)...(0): Zea mays BAC clone full insert sequence contig bacm.pk155.l13.fis6
ggccgcgaacactcctatcggggagtgcgtactcaactgtcaggcgacggacgtaaccaagaacggtaggtccaaacacatgtttggggtggtttcgcgcaattttgttgccgcacgtcacccattccgaaaacgggtatcggggtgcatacaaagcatgagtttttgccaccggaaccatttcttcgtttttcgcaacgaacatgcccaatccactaatttaggtccaaaactcatgtttggggtggtttcgcgcaatttcgttgccgcacgtcacccattacgaaaacgggtgtcggggtgcataaaaagcatgagtttttgccaccggaaccatttcttcgtttttcgcaatgaacatgtccaatccactactttaggtccaaaactcatgtttggggtggtttcgcgcaattttgttgccgcacgtaatccattccgaaaacgggtatcgaggtgcatacaagcacgagtttttgccaccagaaccatttcttcgtttttcgcaatgaacatgcccaatccactactttaggtccaaaactcatgtttggggtggtttcgcgcaatttcgttgccgcacatcacccattccgaaaagggtgtcggggtgctaccaagcacaagtttttccaccgggaccatttcttcctttttcgcaccaacatgcccaatccagtaatttagggcccaaaacccatgttgggggggtttccggcaaatttcttggccccagtcacccattctgaaaaacggggtggggggc

SEQ ID NO: 443 - DNA, 769 bp, Zea mays
  source (0)...(0): Zea mays BAC clone full insert sequence contig bacm.pk155.l13.fis7
gaccgctaacactcctataggggagtgggatcatccatcgtcgggcgaggatcgttaccttgatgcgccccgacacccgttttcgaaatgggtgacgtgcggcaacgaaattgcgcgaaaccaccccaaacatgagttttggacctaaagtagtggattgggcatgttcgttgcgaaaaacgaagaaatggttccggtggcaaaaactcatgctttgaatgcaatccaacacccattttcggaatgggtgacgtgcggcaacgaaattgcgcgaaaccaccccaaacatgagttttggacctaaattagtggattgggcatgttcgttgcgaaaaacgaagaaatggttccggtggcaaaaactcgcgctttgtatgcaccgcgacacctgctttcagaatgggtgacgtgcggcaacgaaattgcgcgaaaccaccccaaacatgagttttggacctaaattactggattgggcatgttcgttgcgaaaaaagaagaaatggttccggtggcaaaaactcgtgctttgtagcaccccgacacccgttttcggaatgggtgatgtgcggcaacgaaattgcgcgaaaccccccaaacatgagttttggacctaaagtagtggattgggcatgttcattgcaaaaaacgaagaatggttccggtggccaaaactcgtgcttgtagccccccgatacccctttccgaaatggattacggggggcaacaaatgcgcgaaaccccccaaaaatgagtttgggcctaagtagtg

SEQ ID NO: 444 - DNA, 734 bp, Zea mays
  source (0)...(0): Zea mays BAC clone full insert sequence contig bacm.pk155.l13.fis8
  misc_feature (1)...(734): n = A,T,C or G
atccagcccattnnnnnnnnnnnnnnnnnnnnnnnnnnnnnnnnnnnnnnnnnnnnnnnnnnnnnnnnnnnnnnnnnnnnnnnnnnnnnnnnnnnnngcaaagtaggaaaccgatcctttctcaagtgcaaccaaaccatatcacctggctcaaaagtaacaagttttcttcctttactaccagcaacctgattttttgcattagtaacagcaatgttttgttgagtttgttcatggaggttaatcatttgttcaacatgtgcaacagcatctatgtgtggggcgtccgcagcatcaagcgaaaacaaagcaataggcgccctaggaatgtaaccataaacaatttgaaaagggcacatctttgtagaagaatatgttgcatgattataagcaaactcaacatgatgcaagcaatcctcccaacgtttcaaatttttgtctaaaacagccctaagcatggtagacaaagttcgattaactacctcagtttgaccatcagtctgaggggtgacaagtggtgctaaacagcaatttagttcccaatttattccacagagatctccaaaaatgactaagaaacttagcatcacgatccgagactattgtatttggaataaccgggccaaaatggcccaaaaaaaaaggggggggggggggggggggggccccccccccccannaaaanaggnngggggggggggggggggggggggggtggntgtgggaggttgttt

SEQ ID NO: 445 - DNA, 766 bp, Zea mays
  source (0)...(0): Zea mays BAC clone full insert sequence contig bacm.pk155.l13.fis9
  misc_feature (1)...(766): n = A,T,C or G
gacccgtatannnnnnnnnnnnnnnnnnnnnnnnnnnnnnnnnnnnnnnnnnnnnnnnnnnnnnnnnnnnnnnnnnaacaaagaaatggttctagtggcataaactcgtgcttgtatgcacgctcgacacccgttttcggaatgggtgacgtgcggcaacgaaattgcgtgaaaccaccccaagcatgagttttggacctaaattactggattgggcatgttcgttgcgaaaaacgaagaaatggttccggtggcaaaaactcgtgctttgtatgcaccctgacacccgttttcggaaagggtgacgtgcggcaacgaaattgcgcgaaaccaccccaaacatgagttttggacctaaattactggattgggcatgttcgttgcgaaaaacgaagaaatggttccggtggcaaaaactcgtgctttgtatgcaccctgacacccgttttcggaaagggtgacgtgcggcaacgaaattgcgcggaaatccacatgagttttggactctacctaatggattgggcatggttcgttgcgaaccaacaaaaaaaatgaatctggtggcgaaaactcaaggcttggattgcaccccgaccacccgattttcgggatgggatgacggggcgggacgaaattggcttgaacccacccccaccctaaaatttgggcctaaactaaaaagaattgggctagttccttttccaaaacaaaaaaaaaaaattcggggggcaaaaaaaaaaacctgggttggcccccccccccccgc

SEQ ID NO: 446 - DNA, 772 bp, Zea mays
  source (0)...(0): Zea mays BAC clone full insert sequence contig bacm.pk155.l13.fis10
  misc_feature (1)...(772): n = A,T,C or G
acgnnnnnnnnnnnnnnnnnnnnnnnnnnnnnnnnnnnnnnnnnnnnnnnnnnnnnnnnnnnnnnnnnnnnnnnnnnnnnnnnnnnnnnnnnnnnnnnnnnnnnttgccggtcacccattccgaaaatgggtgtcggggtgcatacaaagcacgagtttttgcctccggatcaatttcttcgtttttcgcaacaaacatgcccaatccactactttaggtccaaaactcatgtttggggtggtttcgcggaatttcgttgccgcacgtcactcattccgaaaatgggtcttggggtgcatacaaagcacgagtttttgccaccgaaactgtttcttcgtttttcacaacgaacatgcccaatccactactttaggtccaaaactcatgtttggggtggtttcgcgcaatttcgttgccgcacgtcaccccttccgaaaacaggtgtcgggttgcatacaaatcacgagtttttgccaccggatcaatttcttcgtttttcgcaacgaacatgcctaatccactaatttaggtccaaaactcatgtttggggtggtttcgcgtaatttcgttgcagcacgtcacccattccgaaaatgggtgttgggttgcttcaaagcatgagtttttgccaccggaaacatttcttcgttttttcgcacgaacatgcccaatccactactttagtccaaaactcatgcttgggggtggtttcacgcaatttcgttgccgcacgtcactcattccaaaaacggttgtcggggtgcatacaaa

SEQ ID NO: 447 - DNA, 771 bp, Zea mays
  source (0)...(0): Zea mays BAC clone full insert sequence contig bacm.pk155.l13.fis11
  misc_feature (1)...(771): n = A,T,C or G
gacgccgtatannnnnnnnnnnnnnnnnnnnnnnnnnnnnnnnnnnnnnnnnnnnnnnnnnnnnnnnnnnnnnnnttgaacagggaaattcaggatatacttgattataaggattattttgatataaccacattgtttgaatatgcttgcaaagctgaacgtgaagtgcagggacgacgatcaaagacatatactaactcttttgcaggccggggtccaacacacagctcaactccttccagccctgcacctcctacgcctagcactacatcgcgcacagggccgaccaagccagtggcgccccctgccaaaggcgccgcttcttccataggacgtacacgggatattcagtgccatcgttgcagagggtttgggcacatgattcgggactgcccaaacaagcgtaccttgcttatacgtgacaatggtgagtactcttcagccagtgattctgaggaaactagtcatgctatgattgccactaaccatgcagaaaatgaggaagtccacgttgatcccatcgacgccgataggtatgagagtcttgttgtgcagcgtgttctcagcacacaggttgcacagggccgaaaaaaatcagcgacacactctattccataccaagggcgtcgtgcacgaacggtcgattcgcatcatcatcgatagtggcagctgcaacaatttggcaagtacagcgttggtagagaaaatattccttgccactcgcacacatcacatccgtatacatttcatggcttaatgaggggggaaaac

SEQ ID NO: 448 - DNA, 745 bp, Zea mays
  source (0)...(0): Zea mays BAC clone full insert sequence contig bacm.pk155.l13.fis12
  misc_feature (1)...(745): n = A,T,C or G
gacggcgaannnnnnnnnnnnnnnnnnnnnnnnnnnnnnnnnnnnnnnnnnnnnnnnnnnnnnnnnnnnnnnnnnnngatgtaaaacaaaacttgaaaaacaaaggaggcgcaactcctatataaatagagagagggggcgcagccctaggggcggccaaccctagtcatccactatgggccgcagttgggctggtcgtctattcttctgggccctcattcttcagtagcatgacgaagttaagatctctggcacgggcccgaagtgattgggcccagcctaatgaaggaaagtgcgcttgatgtgnaggtgctgctggtgtagtcgtactcatagtgatgtcctcatcatcctcccctttctgaaagtgagtcgtcctcgacgggcactcctcatcctcggncataatatgtttcaaatctgccacattaaaactagtggaaacccccaaaattccgcaggccgggtcagggaattaagcattacccattaatcttggttaaccccctaaaaaggggcccccccccccgagggctttattttaaaaagggcccaaaattagaaaacccatccctttttctagaggggaaccaaaaaccatttcccctgggtccaaaaaaaaaaaagtttttttcccttttatcacccccaaaccccgttttttttgcatataaaaaaaccaaaattttttttttaattttttgtttcggggggtaaaaaaatttttttctccaaagggggaaaa

SEQ ID NO: 449 - DNA, 490 bp, Zea mays
  source (0)...(0): Zea mays BAC clone full insert sequence contig bacm.pk155.l13.fis13
aagcatgagtttttgccaccgcaaccatttcttcgtttttcgcaaaaaacatgcccaatccaatactttgggtccaaaactcatgtttggggtggtttcgcgcaatttcgttgccgcacgtcacccattccgaaaacgggtgtcggggtgcatacaagcacgagtttttgccaccggaaccatttcttcgtttttcgcaacgaacatgcccaatccactactttaagtccataactcatgtttggggtggtttcgcgcaatttcgttgccacacgtcacccattccgaaaacgggtgtcggggtgcatacaagcacgagtttttgccaccggaaccatttcttcgtttttcgcaacgaacatgcccaatccactactttaggtcaaaaactaatgtttggggtggtttcgcgcaatttcgttgccgcacgtcacccattccgaaaacggatgtcggggtgcatacaagcacgagtttttgccaccgaaac

SEQ ID NO: 450 - DNA, 926 bp, Zea mays
  source (0)...(0): Zea mays BAC clone full insert sequence contig bacm.pk155.l13.fis14
  misc_feature (1)...(926): n = A,T,C or G
tgataaatactttggaaaacactaagttttgaaaattggtggtggtgcggtccttttgctagggctcatactttctccccctttggcatgaatcgccaaaaacggaatcattagagccctcgaagtactatcttcccctttggtcataagtaaatgagttaagattataccaaagacgaagtccggtccttttgcttggggcttttactctctcccccaaagacaaggtccttttcttggagcgatggcgaaggatgagttacggagtggaagcctttgtctttcgccgaagactccaatttcctttcaatatacctatgacttggtttgaaatagactcgaaaacacattagtcatagcatatatgatcaaaagtatgaatgagctatgtgtgcaatctagcaaaagaagttgcgagaatcaagaatattgagctcatgcctaagtttggtaaaagtttgttcatcaagaggcttggtaaagatatcggctaattgatctttagtgttaatgtatgaaatctcgatatcccccttttgttggtgatccctaagaaaatgataccgaatggctatgtgcttagtgcggctatgctcgacgggattgtcggccattttgattgcactctcattatcacatagcaaagggactttggttaatttgtaaccgtagtcccgtagggtttgcctcatccaaagcaattgcgcgcaacagtgacctgcggcaatgtactcggcttcggcggtgganagagcgaccgaattttgcttctttgaagcccaagacaccaaggatcttcccaagaactggcnaagtcccgatgtgcttttcctataantttgcaccccgcccatcggcatccgaataacaatcaaatcaaatgtggatccccgagggtaccaaagcccaactttagagtataagca

SEQ ID NO: 451 - DNA, 892 bp, Zea mays
  source (0)...(0): Zea mays BAC clone full insert sequence contig bacm.pk155.l13.fis15
agaaagcgggtgtcggggtgcatacaagcacaagtttttgccaccggaaccatttcttcgtttttcgcaacgaacactcacaatccactactttaggtccaaaacacatgtttggggtggtttcgcgcaatttcgttgtcgcacgtcacccattccgaaaacgggtgtcggggtgcatacaagcacgagtttttgccaccggaaccatttcttcgtttttcgcaacgaacatgcccaatctactaatttaggtccaaaacttatgttttgggtggtttcgtgcaatttcgttgtcgcacgtcacccattccgaaaacgggtgttggattgcattcaaagcacgagtttttgccaccggaaccatttcttcgtttttcgcaacgaacatgcccaatccactactttagttccaaaactcatgtttggggtggtttcgcgcaattttgttgtcgcacgtcactcattccgaaaacgggtgtcgcggtgcatacaaagcacgagttttttgcaccgggaaaccatttctcgttttttcgcaacgaaaaatgcccaaatccactaactttagggtcaaaaacccatggtttggggggtgggtttcccccacaattttccgtttgccccaccggtcccccccatttcccaaaaaaagaggggtggcggggggggggcctacacaaaaaacgaatttttttgcccccccggagaaaacttttttttttgtttttttccccacaaaagaaatctccccaaccccccaatcttttaggggccaaaaaaccctttttttttggggggggggtgtttctcccccaaatattttttttgtgccccccggtgtccccccatttttaaaaaaaaaaggggggtgggggggtgtgcatcaaaaaac

SEQ ID NO: 452 - DNA, 660 bp, Zea mays
  source (0)...(0): Zea mays BAC clone full insert sequence contig bacm.pk155.l13.fis16
ccaggctttgtgccaagaagatccaagtgtgtagccaagcttccccctaggtggaaatcaagctgctcacattatctggtatctgcatgaagtcggggttgaaaatgagcaagctacgctatttatggatgatctggagcattgtgccatagtttagtaagcctctttcacttaaccaagttaaggctctaaattagtctatttggttgggagatccctgatgagctccaggtggatccttcgcggggatgcagctttccccttgagttggtctccccttcatggtcattttcttcttttgactcatgggtagattcgaaagatgagtcaatattcattcccttaaggagctgcctttacttggaagaaaatctacttggtctaaccagaaagaagacacgaccttagttaagcttgataagagtgttctgcactactgattgggaggcttcatttcctaactgcattttacatagcaatgcctcgaatatgtctgacaattgccacttaattttgggtcttaagatgggccttaaaggaagaaaacgttttcattttgaaagtttttggcatcagatgcaaagctttcaagaggtggtagatgaatcttggaactccaacctttctgttaattgtcccatgaagtgactagctctcaag

SEQ ID NO: 453 - DNA, 775 bp, Zea mays
  source (0)...(0): Zea mays BAC clone full insert sequence contig bacm.pk155.l13.fis17
  misc_feature (1)...(775): n = A,T,C or G
tgaagaagatagtgtcagacagaggaacacagttcacctctcatttttggcagcagctgcatgaagccttgggcacacatctgaatttcagttcatcatatcatccgcagacagatggtcagactaaaaggaccaaccaaattcttgaagacatgtagagagcctgtgtgttgcaagaccagtccggatgggacaagagattgccttatgcagagttttcctataacaacagttactaggccagcttgaagatgtcaccatttcaggcgctttatggaaggagttgtagaactccgttgcaatgggatcagcctggagaaaagcaagtgttcgggccagacattcttcttgaagccgaagagaacatcaagatggttcgagagaatctgaagatagcgcagtcaagacaacgaagttatgcagacacaagaagaagagagctgagtttcgaagtcggagacttcgtctatctaaaagtgtcaccgatcagaggagtctgaaggttcggagtcaaaggcaagctagcaccccactacattggtccgtaccaaattctctcaaggcgtggagaagtggcctatcaacttagtctgccagagaatttgtctgctgtgcatgatgtctttcatgtgtctcagttgaagaagtgcttgcgtgtgccggaagagcagttgctagttgaaggtcttgaagtccacgagatcaaggtaatcgatnccgtcgcctcgccctgtgtaataagacccactcgcccgataggagtcgtatacgggtc

SEQ ID NO: 454 - DNA, 1069 bp, Zea mays
  source (0)...(0): Zea mays BAC clone full insert sequence contig bacm.pk155.l13.fis18
ggcctccaccttagcttgatcaacttcaattccctgcggtgtcacaacatagccaagaaaagagacacggtctgtgcaaaatgtgcacttgtcaaggttaccaaataagcgtgcttcacgtaaagcattgaaaacagcacgtagatgatcaagatggtctactagacatttgctatagatcaagatgtcatcgaagtagacgaccacaaatcttccaatgaaagcacgtaaaacctcattcattaatctcatgaaagtactaggtgcattagtgagaccaaaaggcatgactaaccactcatacaaaccaaacttggttttaaacgccgttttccattcatcccctagcttcatgcgaatttggtgatatccactacgtaagtcaattttagagaaaatcattgagccactaagttcatccagcatatcatctaacctagggataggatgacgatatctgatggtaatgttattaattgctcgacaatctacacacatgcgccatgagccatctttctttgggactaataaaacagggacagagcaaggactaagggactcacgcacataacctttatcgagtaattcttgtacttgtcgctgaatctccttggtttcttccgggtttgtcctgtatggcgctcggtttggcaaggaagcccctgggatgaggtcaatctgatgctcaattcctcttatcggtggcaggccaggtggcacttcgtttggaaatacatcagcatattcctgcaaaatattagtgacagtagaaggcaaagtagatggtatgttgtgaagtgagaacaaagcatccttgcaaataaatacatagcagattgaagcaacatcatttaattcaagcaaatcagatttggaagcaagaaaacaagcacttttcagttgtatttctgtcttcctcacttgagtagatttagaattgtcactcttatgttgtaccaactcctttgcagcacctggatttttattatgaacagatttatttttctcttttgcagctctagcaacttcatccttcaaaatagcatcggaggacatggggtgcaatact

SEQ ID NO: 455 - DNA, 1231 bp, Zea mays
  stem_loop (0)...(0): Zea mays BAC clone full insert sequence contig bacm.pk155.l13.fis19
  misc_feature (1)...(1231): n = A,T,C or G
tggacctaaagtagtgcattgggaatgttcgttgcgaaaaacaaagaaattgatccggtgggaaaaactcgtgctttgtatgcaccgcgacacccgttttcggaacgggtgacgtgcgacaacgaatttgcgcgaaaccacccgaaacatgagttttggaccaaaattagtggattgggcatgttcgttgcgtaaaatgaagaaattgatccggtggcaaaactcgtgctttctatgcaccccgacacccgttttcggaatgggtgacgtgcggcaacgaaattgcgcgaaaccaccccaaacatgagttttggacataaattagtggattgggcatgttggttgcgaaaaacgaagaaatggttccggtggcaaaaactcgtgcttgtatgcaccccgacacccgttttctgaatgggtgacgtgcggcaatgaaattgcgcgaaaccaccccaaacatgtgttttggacccaaagtactggattgggcatgttcgttgcgaaaaacgaagaaatgtttccggtggcaaaaaaactggtgcttgtatgcacgctcgacacccgttttcggaatgggtgacgtgcggcaatgaaattgcgcgaaaccaccccaaacatgagttttggacctaaagtagtggattgggcatgttcgttgcgaaaaacgaagaaatggttctggtggcaaaaactcgtgcttgtatgcaccctcgacacctgttttcggaatgggtgacgtgcagcaacgaaattgcgcgaaaccaccccaaacatgagttttggacctaaagtagttgattgggcatgttcgttgcgaaaaacgaagaaatggttccggtgccaaaactcgtactttgtacgcaccccgacaccccgtttttggaatgggtgacgtgcggcaacgaaattgggcgaaaccaccccaaacatgtgttttggacctaaagtagtggattgggcatgttcgttgcgaaaaacgaagaaatggttccggtggcaaaaactcgtgcttgtatgcacgctcgacacccgttttcggaatgggtgacgtgcggcgacgaaatttcgcgaaaccaccccaaacatgtgttttggacctaaagtagtggattgggcatgttcgttacgaaaaacgaagaaatggttccggtggccactcttgcgtaacgatnccgtcgccatggcaaagcataaaaaaacgcacttcgccctatagtagtcgatagccgtc

SEQ ID NO: 456 - DNA, 554 bp, Zea mays
  source (0)...(0): Zea mays BAC clone full insert sequence contig bacm.pk155.l13.fis20
tggaaagaaccacttctatgctgcgatctagagtgagatttgttaaagatagtgatgctaatacttctttcaagcacaagctacattcaggacaaggaagaatttcatccataatctggtggttaatgaccaactacttacttcccaagttgatgtaatgccccgaattttagagttgaatttttttctttcactcgctaaattcgggcgttacctctctttcccatttcttttcgctaaaaccctacccatttccaaaactctatgtcgtgtgataatagtaaaccctagaaatattttctttggttgttgcatcatgccgatccacgcatcaatttcccttgtgagtatttgcttgatttccataaagtatgcacttagtagagggttagagggaaatggataatgggaaatagggaaataaatagaatagggaatttccccctcccccctcttgggtcggcttccagccgcggcccagccggctaccagccgtggcctgccccgccccccctcggcccagatcgccccccccctcccgggcaaggtaaagg

SEQ ID NO: 457 - DNA, 989 bp, Zea mays
  source (0)...(0): Zea mays BAC clone full insert sequence contig bacm.pk155.l13.fis21
acgagtttttgccaccggaaccatttcttcgttttttgcaacgaacatgcccaatccactactttaggtccaaaactaatgtttggggtggttttgcgcaatttcgttgccgcacgtcacccattccgaaaacggatgtcggggtgcatacaaacaccaatttttgccacccaaaccatttctttgttttttgcaacgaacatgccccatcctctactttaggtcccaaacacatgtttggggtgggttcgcgcaaattcatttgcgcacgtcacccattcccaaaacgggtgtcggggtgcatacaaagcacgagtttttgccaccgaacccatttcttcgtttttcgcaacgaacatgcccaatccaatactttaggtccaaaactcatgtttggggtggtttcgcgcaatttcgttgtcgcacgtcacctattctgaaaacgggtgtcggggtgcatacaagacgagtttttgtcaccggaaccatttcttcatttttcgcaacgaacattcccaatccactactttaggtccaaaacacatgtttggggtggtttcgcgcaatttcattgtcccacgtcacccattccgaaaacgggtgtcggggtgcatacaagcacgagtttttgccaccggaaccattttttcgtttttcgcaacgaacattcccaatccactactttaggtccaaaacacatgtttggggtggtttcgcgcaatttcgttgtcccacgtcacccattccgaaaacgggtgtcggggtgcatacaagcacgagtttttgccaccggaaccatttcttcgtttttcgcaacgaacatgcccaatccactactttaggtccaaaactcatgcttggggtggtttcacgcaatttcgttgccgcacgtcacccattccgaaaacgggtgtcggggtgcactcaatcaaggtttcgatcctcgcccgacggttgaatgtcccaatccccgaaggagtgttacgggc

SEQ ID NO: 458 - DNA, 687 bp, Zea mays
  source (0)...(0): Zea mays BAC clone full insert sequence contig bacm.pk155.l13.fis22
caacattagcatatgatgcatatggaatgcagtatagtacttatatgcatctgatgtattggggaaacatatgtaggaatatcttgtcataactcataatgctaatgtacagtactcataatgcaataaggctcagctgagcagccttacacatcccccatttctttagtctataaaacatacataacatttcgtaatgtgttatgttcgttttatggtctatcgagcatttaggcatttttctaacagtataaattgtactatgataaatcatcaaagcttatatgcttatgcaagatatatgaaactaattggctacatatattgttctagtattcacacacccacttgtagcccaaccatgtgcttcccgcccccttcccctctccctggcgcttcagccccctagagccacacgtcgtcacctgctccagacacgacggctacaccccttccctccctcccctaagtttgtccccgctggcaagttcaaggcccaatgttggaacgatgaagacgattcctccatcgatggttcctagggctatatctggtcacaagcttcatataaggacgtgtcggtttcatcaagccctcccgtcccgcccagtgctctattcctagagatgatggcggaaactaggtaaaggctgaaaatcgtcgtgctcgtccgcgtcgccctcgcct

SEQ ID NO: 459 - DNA, 670 bp, Zea mays
  source (0)...(0): Zea mays BAC clone full insert sequence contig bacm.pk155.l13.fis23
tgactccaccagaattccttcttcctatttctctatttaagcaactagcagccaccaaagaacttgggttttgtttgatgtaagtttagcctttgctacttccttgtaaacgcgtgtgtcggctagaccacccgaatacttgaaacgggaccccaactttatcagatccgtgcgtgtttgcttgttatcttgttcttgcttgttctcgattgcttgcaggttcaaggctgttcttggcacggcaagagcagcaacaacaggagccggtgtaactatcgctaaggcgcaacacccttgtggttgttgtagtcggatagcacaacgttgacctccaccccaaatcgtagttatcaggagacggtgtacctgttgctcaaggcgccacaccatcttggttgtggtagtcgggcagccaacgtcgttctccaacaagttttccacctccatcatctctcatcgaaagatcgggcacccttctacccgttgggttcatcactattcataaggccccgtatcgaatggctccaaaagagcagattgcattaaagcggcaattggatgatctgctggctaagggcttcattaggcctagcaggtctccatgggcttccccagtattgtttgttgagaaagaagataaaagcaagcggctgtgtgtggatatcgcgct

SEQ ID NO: 460 - DNA, 911 bp, Zea mays
  source (0)...(0): Zea mays BAC clone full insert sequence contig bacm.pk155.l13.fis24
  misc_feature (1)...(911): n = A,T,C or G
tcccatatacttttgtggagcgaggttagatgaaatcgcattaaatcgctccacctagcgtaatcttcaccatcaaaggttggtggtttgcctaatgggacggaaagtaaaggtgtatgtttggaaatgcgagggtagcgtagggggatcttactatacttcttgcgctcttggcgcttagaagtgacgaagggcgcatcggagtcggaggtcgatgttgatgaagtgtcagtctcgtagtagaccaccttcctcatcctcttgtgcttgtcgcctttccgacgcgacttgtgggaagaagatttttccttcttctctttgtggtgagaagaggaagatcttttctccttccgtttggaggagtccttcttcttctccttcctcttggtgcgggactcttccgatgaagtgctcccgtggcttgtagtgggcttttcgccggtctccatctccttcttggcgtgatctcccgacatcacttcgagcggttaggctctaatgaagcaccgggctctgataccaattgatagtcgcctagagggggggtgaatagggcgaaactgaaatttanncaatataacaccactaccagccggggttagcgttagaaatataaacgagtccacgagaaagggcggcaaacaatcgccagcaaataatgaagtgagacccacggatttggttttaccgaggtttcggtctttgcaaccttaatccccgtttaaggaggccacaaagggccggttttcttttaaacctttccctcttttaaaagggtcccttggaacccagtgagcctctctttccaaatccctttgggattcaaatttccccaaggcccccccccccaaatgggcccccttgcccttttttcaaaggggggggtttgattcccaaaaagaatcccgaat

SEQ ID NO: 461 - DNA, 676 bp, Zea mays
  source (0)...(0): Zea mays BAC clone full insert sequence contig bacm.pk155.l13.fis25
gaattgtgatggaataagtcttgagcatctagaggacaacagtcgcttttgactgtcctctgtagtccttgagcatctagaggacatcagtcgcttttgactgtcctctgtagtcctttagcatctagaggatagcttgactgtcctctgtagtctctttagcatctataggacaatcctgctgtgtagtgtgtgtgagaaggtgtggtagtgcagcctctagggctataaatatgggtctccaacccttagatgggtatgacattgtgtagtgtttgaggaaataaacagaaaattgccccaactcatagtgtcatcctcttgatgagagttagagtccctctacttacaattggtatcagagccaaactatcctgcagcctaaacatctcgtgctcatctccttcccgcgcctctccccacactcagtcggcagcaagagctccaactgttccttcctcccctgctcagacgagcagcctttcgtctgagacagcctcttccacacgcagcgacccctcactagcccaccatgtccctacgctcggccacttcgagtgcgcggcgccagcaggaggccgaggtcgccgcggcacaagaacgcgagcgagcagcagcagcggctgcagcgacagcgacgagggcagcacggttggcggcggcggaactggcagcg

SEQ ID NO: 462 - DNA, 682 bp, Zea mays
  source (0)...(0): Zea mays BAC clone full insert sequence contig bacm.pk155.l13.fis26
aggaggtcctcttgggaatccaaaaggtcatccttttcatgaatagcactaaccaattcatttaatttttccttttgagctatgttaaggttggcaaaaagggaacgcaaattatcttcctcatcactagcattgtcatcactagaggattcatatttagtggaggatttagatttaaccttctttttgccgtcctttgccatgaggcacttgtggccgacgttggggaagaggagtcccttggtgacggcgatgttggcggcgtcctcgtcgtcggatgagtcgcttgagctttcgtcggagtcccactcccgacaaacatgggcatcgccgcccttcttcttgtagtatctcttcttctcctttcgcctccccttcttgtcgtcacctcggtcactgtcactggatataggacatttagcaataaaatgaccgggcttaccacacttgtagcaaaccttcttggagcgggatttgtaatccttccccctcctttgcttgaggatttgacggaagctcttgatgacgagcgtcatttcctcattgtcgagcttggaggcgtctattggttgccgacttggtgtagactcctccttcttctcctccgttgccttgaatgcaacgggttgagcttcggatgtggtggcatcatcaagctcgttgatcttcctcgagccttcga

SEQ ID NO: 463 - DNA, 1056 bp, Zea mays
  source (0)...(0): Zea mays BAC clone full insert sequence contig bacm.pk155.l13.fis27
gaagaaatggttccggtggcaaaaactcgtgctttgtatgcacagcgacacccgtttttggaatgagtgacgtgcggcaacgaaattgcgcgaaaccaccccaaacattagttttgtacctaaagtagtggattgggcatgttcgttgtgaaaaacaaagaaatggttccggtggcaaaaactcgttcttgtatgcaccccgacacccgttttcggaatgggtgacgtgcggcaacgaaattgcgcgaaaccactccaaacatgtgttttggacctaaagtagtggattgtgagtgttcgttgcgaaaaacgaagaaatggttccggtggcaaaaactcgttcttgtatgcacccgttttcggaatgggtgacgtgcggcaacgaaattgcgcgaaaccaccccaaacatgtgttttggacctaaagtagtggattgggcatgttcgttgcgaaaaacgaagaaatagttccggtggcaaaaactcgtgcttgtatgcaccccgacacctgttttcggaatgggtgacgtgtgacaacgaaattgcgcgaaaccaccccaaacatgtgttttgacctaaagtagtggattgagaatattcgttgcgaaaaacgaaataatgggtccggtggcaaaaactcgttcttggatgcaccccgacacccgttttcggaatgggtgacgtgcggcaacaaaattgtgcgaaaccaccccaaacatgtgttttggacctaaagtagtggattgggcatgttcgttgcgaaaaacgaagaaatggttccggtggcaaaaactcgtgctttgtatgcaccgcgacacccgctttcggaatgagtgacgtgcgacaacaaaattgcgcgaaaacaccccaaacatgagttttggaactaaagtagtggattgggcatgttctttgccaaaaacgaagaaatggttctggtggcaaaaactcgtgctttgaatgccccccacacccctttttcggaagtggtggacgggcgaccaaccaattgccccaaaaccccccaaacattaatttttgggacctaattagagg

SEQ ID NO: 464 - DNA, 1605 bp, Zea mays
  source (0)...(0): Zea mays BAC clone full insert sequence contig bacm.pk155.l13.fis28
  misc_feature (1)...(1605): n = A,T,C or G
tacttatgcccaaagggaaagatagtcctgcgagggctctaatgatccgttttttggcgattcatgccaaaggggagaaagtctgagccccaagcaaaaggaccgcttcacccccattttcaaaaacttagtgttttccaaaagtatttatcaattggtattctatcgtgtgcaaaaagaagaaagtagtgtttcaaaaataatatatcaaaaccctcttgaacactaagaggtggatctcctgtagggggagttttgtttagtcaaaggaaaagcatttgagacagggggagaaaatttcaaatcttgaaaatgctctgctaaactcttattcatttacctttgactgtttgcaaaagaactttgaaaaagatctacaaaagagtttgcaaaaacaaaacatgtggtgcaagcgtggtccaaaatgttatataataaagaaacaatccatgcatatcttgtaagtatttaaattggctcaattccaagcaacctttacacttacattatgcaaactagttcaattatgcacttctatatttgctttggtttgtgttggcatcaatcaccaaaaagggggagattgaaagggaattaggcttacacctagtccctaattaattttggtggttgaattgcccaacacaaataatcggactaactagtttgcccaagtgtatagattatacaggtgtaaaaggttcacactcagccaataaaaagaccaagttttggattcaacaaaggagcaaaggggcaaccgaaggcacccctggtccggcgcaccggactgtccggtgtgccaccggacatgtccggtgcaccaggggaacttagactcaaactctccaccttcgggaattcccagaggcgactcgactataattcaccggactgtccggtgtacaccggacagtgtccggtgcgccaagggaggtcggcctcaggaactcgccagcttcgggaaaagccaacggctcgtccactataattcaccggactgtccggtgtgcaccggactgtccggtgcgactccggggcaacggctatctccgcgccaacggctctctgccgagcaataaatgcgcgcgcagcgcgcgcagaagtcagaatcgcccatgctggcacaccggacagccaacagtacctgtccggtgtgcaccggacaccaaggcgggcccacaagtcagaagctccaacggtcagaatccaacggcagtgatgacgtggcaggggggcaccggactgtccggtgtgcaccggactgtccggtgcgccatcgagcagacagcctcccaacgaccacttttggtggttggggctataaatacccaaaccaccccaccattcattgcatccaagttttccacttcccaactactacaagagctctagcattcaattctagacacaccaaagagatcaaatcctctccaattccacacacaaaaccctagtgactagagagagtgatttccttgtgttctttcgagctcttgcgcttggattgctttcttctatcttgattctttcttgtgatcaaaaactcacattgtaatagaggcaagaggcaccnattgtgtggtggccccttgcgggaagttg

SEQ ID NO: 465 - DNA, 1019 bp, Zea mays
  source (0)...(0): Zea mays BAC clone full insert sequence contig bacm.pk155.l13.fis29
aacgggtgtcgcagtgcatagaaagcacgagtttctgccaccggaaccatttcttcgtttttcgcaacgaacatgcccaatccactactttaggtccaaaactcatgtttggggtggtttcgcgcaatttcgttgctgcacgtcacccattccgaaaacgggtgtcgggggtgcatacaagcacgagtttttgccaccggaaccatttcttcgtttttcgcaacgaacatgctcaatccacttctttaggtccaaaactcatgtttggggtggtttcgcgcaatttcgttgccatacgtcactcattccgaaaacgggtgtcgcagtgcatacaaagcaggagtttttgccaccggaaccatttctttgtttttcgcaacaaacatgcccaatcaactactttaggtccaaaacacctgtttggggtggtttcgcgcaattttgttgctgcacgtcacccattccgaaaacgggtgtcgggatgcatacaagcacgagtttttgccaccggatccatttcttcgtttttcgcaacgaacatgcccaatccactactttagttccaaaactcatgtttggggtggtttcgcgcaatttagttgccacacgtcactcattccgaaaatgggtgtcggggtgcatacaaagcacgggtgtcggggtgcatacaagcacgagtttttgccaccggaaccatttctttgtttttcgcaacgaacatgcccaatccactaatttaggtccaaaactcatgtttggggtggtttcgcgcaatttcgttgctgcacgtcacccattccgaaaacaggtgtcggggtgcatacaagcacaagtttttgccaccggaaccatttcttcgtttttcgcaacgaacatgccaatccactactttcggtccaaaactcatgtttggggtggtttcgcgcaatttcgttgccgcacgtcacccattccatcaagcgtacgatcctcgcctcggcgggtttgagtaccattccccatagtgagtgttagcggtc

SEQ ID NO: 466 - DNA, 938 bp, Zea mays
  source (0)...(0): Zea mays BAC clone full insert sequence contig bacm.pk155.l13.fis30
ctgaaccatttcttcgtttttcgcaacgaacattcccaatccaatactttaggtccaaaactcatgtttggggtggtttcgcgcaatttcgttgtcgcacgtcacctattccgaaaaagggtgtcggggtgcatacaagcacgagtttttggcaccggaaccatttcttcgtttttcgcaacaaacatgtccaatcaactactttaggtccaaaactcatgtttggggtggtttcgcgcaatttcgtggccgcacgtcacccattccgaaaatgggtgtcggggtgcatacaagcacgagtttttgtcaccggatcaatttcttcgtttttcgcaacgaacatgcctaatccactactttaggtccaaaactcatgtttggggtggtttcgcgcaatttcgtggctgcacgtcacccattccgaaaatgggtgtcggggtgcatacaagcaccaagtttttgcaccgaaaccatttttttgtttttcgcaacgaacatgccccatcctctactttaggtccaaaacacatgtttggggtggtttcgcgcaatttcattgccgcacgccacccaatccgaaaacgggtgtcggggtgcatacaaagcacgagtttttgccaccggaaccatttttacgtttttcgcaacgaacatgcccaatccactactttaggtccaaaactcatgtttggggtggtttcgcgcaatttcgttgtcgcacgtcacctattctgaaaacgggtgtcgggtgcatacaaggacgagtttttgccaccggaaccatttcttcatttttcgcaacgaacattctcaatccactactttaggaccaaaacacatgtttggggtggtttcgcgcaatttcgttgtcgcacgtcacccattccgaaaacgggtgtcggggtgcatacaagcacgagtttttgtcaccgcgcaac

SEQ ID NO: 467 - DNA, 1035 bp, Zea mays
  source (0)...(0): Zea mays BAC clone full insert sequence contig bacm.pk155.l13.fis31
gacggcgaaacgactcctatgggcgaattgggacaattacaaccgcgaggtcgacggatcgataccttgatgaagaaatagttccggtggcaaaaactcgtgcttgtatgcaccccgacacctgttttcggaatgggtgacgtgtgacaacgaaattgcgcgaaaccaccccaaacatgtgttttgacctaaagtagtggattgagaatattcgttgcgaaaaacgaagtaatggttccggtggcaaaaactcgttcttggatgcaccccgacacccgttttcggaatgggtgacgtgcggcaacgaaattgtgcgaaaccaccccaaacatgtgttttggatctaaagtagtggattgggcatgttcgttgcgaaaaacgaagaaatagttccggtggcaaaaactcgtgctttgtatgcaccccgacacccgttttcggaatgcgtgacgtgcggcaacaaaattgcgcgaaaccaccccaaacatgagttttggacctaaagtaatggattgggcatgttcgttgcgaaaaacgaagaaatggttccggtggcaaaaactcgtgctttgaatgcaatccaacacccattttcggaatgggtgacgtgtggcaacgaaattgcgcgaaaccaccccaaacatgtgttttggacctaaattagtggattgggcaagttcgttgcgaaaaaagaagaaatggttccgatggcaaaaactcgtgctttggatgcaccgcgacacctgttttcagaatgggtgacgtgcggcaacgaaattgcgcgaaaccaccccaaacatgagttttggacctaaattactggattgggcatgttagttgcgaaaaacgaagaaatggttccgatggcaaaaactcgtgctttgtagcaccccgacacccgttttcggaatgggtgacgtgcggcaacgaaattgcgcgaaaccaccccaaacatgagttttggacctaaagtagtggattcggcatgttcattgcaaaaaacgaagaaatggttccggtggcaaaaactcgtgc

SEQ ID NO: 468 - DNA, 1170 bp, Zea mays
  source (0)...(0): Zea mays BAC clone full insert sequence contig bacm.pk155.l13.fis32
  misc_feature (1)...(1170): n = A,T,C or G
tccaaaactcatgcttggggtggtttcgcacaatttcgttgctgcacgtcacccattccgaaaacgggtgtcggggtgcatacaagcacgagttttggccactggaaccatttcttcgtttttagcaacgaacatgcctaatccattactttaggtccaaaactcatgcttggggtggtttcgcataatttcgttgctgcacgtcacccattccgaaaacgggtgtcggggtgcatacaagcacgagtttttgccaacggaaccatttcttcgttcttcgcaacgaacatgcccaatccactactttaggtccaaaacacatgtttggggtggtttcgcgcaatttcgttgccgcacgtcacccattccgaaaacgggtgtcggggtgcatacaagcacgagtttatgccactagaaccatttctttgtttttcgcaacaaacattcccaatccagtaatttaggtacaaaacacatgtttggggtggtttcgcgcaatttcggtgccgcacgtcacccattctgaaaacaggtgtcgcggtgcatacaaagcgcgagtttttgccaccggaaccatttcttcatttttcgcaacgaacatgcccaatccactaatttaggtccaaaactcatgtttggggtggtttcgcgcaatttcgttgccgcacgtcacccattccgaaaatgggtgttggattgcattcaaagcatgagtttttgccaccggaaccatttcttcgtttttcgcaacgaacatgcccaatccactactttaggtccaaaactcatgtttggggtggtttcgcgcaatttcgttgccgcacgtcacccatttcgaaaacgggtgtcggggtgcatacaaagcacgagtttttgccaccagaaccatttcttcgtttttcgcaacgaacatgcctaatccactactttaggtccaaaactaatgttggggatggttttgcgcaatttcgttgccgcacgtcacttatttcgaaatgggtgtcggggtgcatacaaagcacgagtttttgccactggaaccatttcttcgtttttcgcaacgaacatgcctaatccattactttaggtccaccctcttgcgtaacgatnccgtcgacctcgacanagctaaagggacgccacttcccctgataggagtcgttacgcgtc

SEQ ID NO: 469 - DNA, 933 bp, Zea mays
  source (0)...(0): Zea mays BAC clone full insert sequence contig bacm.pk155.l13.fis33
caaaactccaccctcgagtaatagattagattgctcgcatctttttcttgttcgttcttcgattgtgcacaggaaacgatcttcgtgatcaggccgatctcgcatcagcaaggtcggtaaccacagggagttggttcagcgattgcattggcgcctcgggcttgctcgtcgtagtcggatcgcaagggtcatcttccgccaaatcggaattatctctactcgccgaaagattgggcacctcagcttcatcaattggtatcagatttccaggttgatcggtgagtttatcgagcgttttttttcctacagtccacaaaaccacatgaaaattcaggttagatcttatcccagcaccttttgagcctcgcactttctttcaataatctgcattgttgaatttgtgtgctttcgcgtcatttgttgctggttgcattgtgttcttccaccattcaaaccctagcgccgccaccatctcccgtttgatcacgccacaaaccgagtcaacgactgtttccttgattttctccttcggttacgtcaaaaaaaaaaaaacagaaaaaacaaaccgagtcaacgaccgtttccttgattttctccttcggttacgaaaaaaaaaacagaaaaaaaaacataccgagtcaacggccgcttccttgtttttctccttcggttacgtaaaaaaaaaacaaaaaaaaaaagataacgaaggagaaaggatacagttgcttcattccggtcgtttttagaacataacttgaggtaccttccgtaaaacgggcataacttttcgctcgggtgtccaaaaaatctgaaatttttacaggagcttgttgacaccattctgagcccggccaaactcacttcggtctgtttgggttcgacaaaattgtcaaaaaaattcaggaaaataaagaaaaaaatccgtcaaagttc

SEQ ID NO: 470 - DNA, 1126 bp, Zea mays
  source (0)...(0): Zea mays BAC clone full insert sequence contig bacm.pk155.l13.fis34
cgtgttgtcctctgtgaatcaaaactccacctcgagtgatattaagataactcgcatctttttcttgttcgttcttcgattgtgcacaggaaacgatcttcgtgatcaggccgatctcgcatcagcaaggtcggtaactattggaagttggttcagcgattgcattggcacttcgggatcgctcgtcgtagtcggatcgtgagggtctacttccaccaaatcagaattatctccactcaccgaaagatcgggcactccagctctatcagttttcccgggcggtcatccaacgaacaggtccttacggagaggcactcgagaaaccgctcgagcccccttaaatgccacaagtataacatcataatagaaaagggaaacaatgtatcattgataattctcatcatgttcattgattagtgttgagcaatagcataaagctaaacaataataatccaactcaaataggtgaacaaggacatggataacgaaagctagtcaatccttaggtacaattgtgtaaatgcgggaagtgaattatagaatgcataggacaaagataggtcaagggacacttgcctccaccaaccagctgctgctcaggggcttctcctgcgagttcttcgggctcctcaaccagatcgttctctatgcgagcgcaaacatacatacatccatccattcgaattaggaaaataaacagtacaccatacaagagagcagataagtcaaatatgcataagatgtgacatacgatattgcattcgtcatggctagaaagagaagaaggaaggtctcgcagtggttaaagctataatcgaagcgtattacggatagatgcataactaatcattatgtgatctagttccacctagttacactaacgagtattagtcacatgcactaatataattataaccattttcaattgatcaacattaaacaaggtcaatgattaactacatgaaataactaacgtaaccaatttctaaatcgagttcccatttattgatataaataacgcgatcactacgcatgagaataccggggggaagacaggcacgtcttggggttgactaacgcgtcgagggcaccgtgagtcgtgccaaagcccctgccgccccctcgt

SEQ ID NO: 471 - DNA, 993 bp, Zea mays
  source (0)...(0): Zea mays BAC clone full insert sequence contig bacm.pk155.l13.fis35
  misc_feature (1)...(993): n = A,T,C or G
gaggcttgttgaaaacgctgcattttgttaagcaaatcacgagcataatagaaaggaacaaatctgtggcgcatggcagtttttaattgggtccaagtaatgacactgttaatgggaagtttttgtttatactcacgccaccaaattaaagcaaaatcagtaaattcactaatgacagccttcacttggctattagcaggaatatcatggcatgaaaatttctgttctacctctaattcccaatcaagatatgcagcaggatcatatttaccattaaaagatggaattttaaatttaatcttagaaaataagtcattagggggatgacgaaccacacgacgtgcacgaccacggcgatctccatcgtcctgctcagtgtcaccgccgtattcttgctccatctttgtggtcaatgcatcaaggcgtgccaggatggtgtcgagtgtggtgcgagtcgctgtttgagcaaggtcaagttggttgaaacgctcggtcgtcgaagtgatcgttgaatcaagtcgttcatgcatcgtcctaatgtcggcagcaagtccatcaacttgtccccttacttcctgcaactgggcatccaccatgtcgtgtgctcctgccatagttagcgcaaacaccaaaaggagaaaaaccaacgacaaaaacaggggtgtactgctcacaaggcgctcacactagtgctgttatcaagttcttatccgttcttaccaagccacagtggtgaaccgcaatcaacaggtggaaccggtgaaagattggatgagcgattgcgtggagaaacagaaacctgctcgtcgtagaaatatgtggagttgtgggtaggttgcactncagtcaaggattagcacgatcaaacataatgcaaagtttgaattatagtgcaaacacgaaactatattgctggccacagtgccaaagatggatggactagtagatgccagtaccgtaaatattgtactagtgatgccaaaaagcactagt

SEQ ID NO: 472 - DNA, 993 bp, Zea mays
  source (0)...(0): Zea mays BAC clone full insert sequence contig bacm.pk155.l13.fis36
cacgtgctgattttgatgatctccatgaagctcatatgccctgttatgcacttgtatgctcacgcatgcttgttccgcttgatgatgcaccgtctttggatataccccctgctgttgttaaccttttgcaggagtatgcttgatgaggacatcattatgagtagttcataatgctcccagcggaaatttggtttatataaatggttggttatgccatttggattgactaatgctcccagcacctttatgcgtttaatgaacgaagttctacgagccttcataggtttgtttgttgttgtttatttcgatgatatccttatttacagcaagtctatagaggagcatttagaacatttgcgtgctgtttttgatgctttgtgtgctgctcgcttgtttggtaacatggaaaagtgcacattttgcacgcaacgtgtctcgtttcttggttatgtggttactccgcagggcattgaggtagatagcagcaagattgctgccattcgggagtggcctacaccgacaacggtcacacaaattcggagctttcttggacttgccggtttctaccgcagatttgttcgtgattttagctccattgcagcgcctctacatgagcttacaaagaaagatgtgccgtttgcttggagtgattcgcaggaggtagcgttcagcactttgaaagataagttaacccaagctcccctcttgcaattgcctgattttaataaagtttttgagcttgaatgcgatgctagcggtattgggctaggtgctgttttgttacaagaaggaaaacagttgcttattttagtgaaaaattaagcggtgctagtctgaaatattctacttatgataaggagctttacgctttagtgcgcactttgcatacatggcagcactatctttggcatcgtgagtgatgcggacatcacaccaacacgagcacatttacacagcagcactttctcaagccaggggccacccctccaccgg

SEQ ID NO: 473 - DNA, 1371 bp, Zea mays
  source (0)...(0): Zea mays BAC clone full insert sequence contig bacm.pk155.l13.fis37
gaagaatagttccggtggcaaaaactcgtgcttgtatgcaccccgacacctgttttcggaatgggtgacgtgtgacaacgaaattgcgcgaaaccaccccaaacatgtgttttgacctaaagtagtggattgagaatattcgttgcgaaaaacgaagtaatggttccggtggcaaaaactcgttcttggatgcaccccgacacccgttttcggaatgggtgacgtgcggcaacgaaattgtgcgaaaccaccccaaacatgtgttttggacctaaagtagtggattgggcatgttcgttgcgaaaaacgaagaaatagttccggtggcaaaaactcgtgctttgtatgcaccgcgacacccgcttttcggaatgcgtgacgtgcggcaacaaaattgcgtgaaaccaccccaaacatgagttttggacctaaagtaatggattgggcatgttcgttgcgaaaaacgaagaaatggttctggtggcaaaaactcgtgctttgaatgcaatccaacacccattttcggaatgggtgacgtgcggcaacgaaattgcgcgaaaccaccccaaacatgtgttttggatctaaagtagtggattgggcatgttcgttgcgaaaaacgaagaaatagttccggtggcaaaaactcgtgctttgtatgcaccgcgacactcgttttcggaatgcgtgacgtgcggcaacaaaattgcgcgaaaccaccccaaacatgagtcttggacctaaagtagtgaattgggcatgttcgttgcgaaaaacgaagaaatggttccggtggcaaaaactcgtgcttgtatgcaccccgacgcccgttttcggaatgggtgacgtgcggcaacgaaattgcgcgaaaccaccccaaacatgggttttggacctaaattagtggactgggcatgttcgttgcgaaaaacgaagaaattgatccggtggcaaaaactcgtgatttgtatgcaacccgacacctgttttcggaaggggtgacgtgcggcaacgaaattgcgcgaaaccaccccaaacatgagttttggacctaaagtagtggattgggcatgttcgttgtgaaaaacgaagaaacagtttcggtggcaaaaactcgtgctttgtatgcaacccaagacccattttcggaatgagtgacgtgcggcaacgaaattacgcgaaaccaccccaaacatgagttttggacctaaagtagtggattgggcatgtttgttgcgaaaaacgaagaaattgatccggaggcaaaaactcgtgctttgtatgcaccccgacacccattttcggaatgggtgaccggcaacgaaattgcgcgaaaccaccccaaacatgtgttttggaccaaaagtaatg

SEQ ID NO: 474 - DNA, 987 bp, Zea mays
  source (0)...(0): Zea mays BAC clone full insert sequence contig bacm.pk155.l13.fis38
ttgctgcacgtcacccattccgaaaacgggtgtcggggtgcatacatgcacgagtttttgccaccggaaccatttcttcgtttttcgcaacaaacatgtccaatccactactttaggtccaaaactcatgtttggggtggtttctcgcaatttcgttgccgcacgccactcattccgaaaatgggtgtcgggtgcatacaaagcacgagtttttgccaccggaaccatttcttcgtttttcgcaacgaacatgcccaatccactactttaggtccaaaacacctgtttggggtggtttcgcgcaatttcgttgctgcacgtcacccattccgaaaacgggagtcggggtgcatacaagcacgagtttttgccaccggaaccatttcttcgtttttcgcaacgaacattcacaatccactactttaggtccaaaactcatgtgtggggtggtttcgcgcaatttcgttgccgcacgtcactcattccgaaaacgggtgttgggtgcatacaagcacgagtttttgccaccgaaaccatttctttgtttttcgcaacgaacatgcccaatccactactttaggtccaaaacacatgtttggggtggtttcgcgcaatttcgttgtcgcacgtcacccattccgaaaacgggtgtcggggtgcatacaaagcacgagtttttgccaccggaaccatttcttcgtttttcacaatgaacatgcccaatccagtactttaggtccaaaactcatgtttggggtggtttcgcgcaatttcattgccgcacgtcacccccaaattcagggcgttagaaaagaagaaaaaaaaattctacccccaaattcagggcgttacaaacctatcccccttaaaagaatctcgccctcgagattcagggttggctagcaaagagctcagggtatttggccatcagatcattttcacgctcccaggttgcttcttcctcagagtgatgactccatctgactt

SEQ ID NO: 475 - DNA, 1074 bp, Zea mays
  source (0)...(0): Zea mays BAC clone full insert sequence contig bacm.pk155.l13.fis39
tgtatgcaccccgacacccgtttttggaatgggtgacgtgcggcaacgaaattgtgcgaaaccaccccaaacatgtgttttggacctaaagtagtggattcagcatgtttgttgcgaaaaacgaagaaattgatccggtggcaaaaacccgtgctttgtatgcaccccgacacccattttcggaatgagtgacgtgcggcaacgaaattgcgcgaaaccaccccaaacatgagttttggacctaaattagtggattgggcatgttcgttgcaaaaaacgaagaaatggttctggtggcaaaaactcgtgcttgtatgcaccctcacacccgttttcagaatgggtgacgtgcggcaatgaaattgcgcgaaaccaccccaaacatgagttttggacctaaagtactggattgggcatgttcattgtgaaaaacgaagaaatggttccggtggcaaaaactcgtgctttgtatgcaccccgacaccgttttcggaatgggtgacgtgcgacaacgaaattgcgcgaaaccaccccaaacatgtgttttggacctaaagtagtggattgggcatgtacgttgcgaaaaacgaagaaatggttccgggtggcaaaaactcgtgcttgtatgcaccccgacacccatttttggaatgggtgacgtgcggcaacgaaattgcgcgaaaccaccccaaacatttgttttggacctaaagtagtggattgagcatgttcgttgcgaaaaacgaagaaatggttccggtggcaaaagctcgtgcttgtatgcaccccgacacccgtgctttgtatgcaccccgacacccattttcggaatgggtgacgtgtggcaactaaattgcgcgaaaccaccccaaacatgagttttggacctaaagtagtggattgggcatgttcgttgtgaaaaacgaagaaatggatccagtggcaaaaactcgtgctttgaatgcaccccgacacccgttttcggaatgggtgacgtgcggcaacgaaattgcccgaaaccaccccaaacatgagttttggacctaaattagtggattgggcatgttcgttgcg

SEQ ID NO: 476 - DNA, 1108 bp, Zea mays
  source (0)...(0): Zea mays BAC clone full insert sequence contig bacm.pk155.l13.fis40
  misc_feature (1)...(1108): n = A,T,C or G
cattgtaaagaaggaaggacatggaacaaatttgttctcactgatggctttgtgtttcgggctaacaaattatgcattccagctggttccgtgcgtatattattattacaggaagcacatggcggtgggttgatgggacactttggtgtgaagaagacagaagacatcctggccagccatttcttttggccgaagatgagaagagacgtggagcgatttgttgctcgctgcactacatgtcaaaaagctaagtctcaccttaattcacatggtttatacatgcctctcccagttcccagtgcaccatgggaggatatttctatggactttgttttaggactacctagaacaaagaaggggagggatagtatttttgttgttgtggacagattttcaaaaatggcacactttataccatgtcacaaaactgatgacgctacccatgttgctgatttgttctttcgtgaagttgttcgtttgcatggggttccaaacactattgtgtccgatcgggataccaaatttcttagtcatttttggaaaacgttatgggctaagttggaaactaaattgctcttttctactacttgtcaccctcaaaccgatggacaaaccgaagtcgtaaaccgtagtttatctaccatgcttagggctgttctgaaacataacatcaaattgtgggaagaatgtttgcctcatattgaatttgcttataatcgttctcagcattctacaactaaactatgcccttttaaaattgtgtatggttttgtccctcgtgctcctattgatcttatcgccatcccacattctgaaataatgaattttgatgcttctcgtcgtgctgaactgattataaagctgcatgaacaaactaaagcaaatattaaagccatgaatgctaagtatgaagaagcaggtagcaagggtagaaagcatattaccttttgaacctggtgatttagtatgggtgcatttaaggaaagatagattccctgatatgcgcaaatctaaatttacaccnagagctgctggacccttcaagtgcttcacaaaataatgantatgcatataaagtcagttgcctgcagattttggggtcagttcc

SEQ ID NO: 477 - DNA, 812 bp, Zea mays
  source (0)...(0): Zea mays BAC clone full insert sequence contig bacm.pk155.l13.fis41
gaccgctatagactcctatagggcgaattgggttatattaactgcgcgcgaggtcgacggtatcttttcaccttgagtgtcatatttagcatttaaatcctcctactaccatatcgtgtagctttacaaaaaaagcccctaacaaaccacaattacacatacggttgaatctagatctcacggaccaaaaaaataattgcacacttgtacctaatgattgcttgcatattagtcactgtcaccctatatcaaagaacgtactataaaaaatatattaaaacatcatcggcttgagcaaactcaaggagagcagaaactcgagttcacgggcgatatggagggcgattctgacacacgtgatggagagggagagtgctcgggggaatcgtttgacccgacctaataactctgagcctcctgtaacacctctggtgtttagcatacttatatattgcatgtgcatcatgaaagcatcattaatcattcactacctatattagaatctagaattgtcacattgttgtgaagtgaactcctccttgaaccaataggaggcttatgtttcatggcaatggatcatcattgagtgcttgtgtgcatgagtaaaaccacctagataatctaggttgataatggttgatctttcaattcttgatttcatgtaatgatagtttcttagactatatgtgatggtgtgacttagtgaatctagtgcttggtaaataaaattctctcaaaaacaaaaattaggaagtaagcatttggctcctaaaattactaattataagaattcaaattccaatagaaaggaa

SEQ ID NO: 478 - DNA, 777 bp, Zea mays
  source (0)...(0): Zea mays BAC clone full insert sequence contig bacm.pk155.l13.fis42
atcgataacgcttgagagacatgctgaatccactaattttaggtccaaaacacgagtgtttggggtggtttcgtgcaatttcgttgtcgcacgtcacccgttccgaaaacgggtgtcgctgtgcatacaaagcacgagtttttgccaccggatcaatttcttcgtttttcgcaacgaacattcacaatccattactttaggtccaaaactcatgtttggggtggtttcgcgcaatttcgttgccgcacgtcacccgttccgaaaacgggtgtcaggttgcatacaagcacgagtatttgccaccgaatcaatttcttcgtttttcacaacgaacatgcccaatccactactttaggtccaaaacacatgtttggggtggtttcgcgcaatttcgttgccgcacgtcacccattctgaaaacgggtgtcggggtgcatacaagcacgagtttttgccaccggaaccgtttctttgtttttcgcaacgaacatgcccaatccactactttaggtccaaaactcatgtttgaggtggtttccgcaatttcgttgccgcacgtcacccattccgaaaacgggtgtcggggtgcatacaaagcacgagtttttgccaccggataaatatctttgtttttcgcaacgaacatgcccaatccactactttaggtccaaaacacatgtttcgggtggtttcgcgcaatttcgttgcagcacgtcacccatttcgaaaacgggtgtcggtgcatacaagcacaagtttttgccactggaaccattt

SEQ ID NO: 479 - DNA, 1197 bp, Zea mays
  source (0)...(0): Zea mays BAC clone full insert sequence contig bacm.pk155.l13.fis43
  misc_feature (1)...(1197): n = A,T,C or G
tgaaattgttcgcttgcatggtgtgcccaacacaatcgtttctgatcgtgatgctaaatttcttagtcatttttggaggactttgtgggcaaaattggggactaagcatttattttttactacatgtcatcctcaaactgatggtcaaactgaagttgtgaatagaactttgtctactatgttaagggcggttctaaagaagaatattaagatgtgggaggactgtttgcctgatgttgaatttgcttataatcgatcattgcattctactataaagatgtgcccatttcaaattgtatatggtttgttgcctcgtgctcctattgatttaatgcctttgccatcttctgaaaaactaaattttgatgctactaggcgtgctgaattgatgttaaaactgcatgaaactactaaagaaaacatagagcgtatgaatgctagatataagtttgctagtgataaaggtagaaaggaaataaattttgaacctggagatttagtttggttgcatttgagaaaggaaaggtttcctgaattgcgaaaatctaaattgttgcctcgagccgatggaccgtttaaagtgctagagaaaattaacgacaatgcatataggctagatctgcctgcagactttggggttagccccacatttaacattgcagatttaaagccctacttgggagaggaagttgagcttgaatcgaggacgactcanatgcaagaaggggagaatgatgaagacatccacactactgatacatctatgccaatacaagtaccaatttctggtcccattacttctgggtcccattactcgcgctcgtgctcgtcaactcaaccatcaggtgattacactcttcaatgcatgtccatcatatttagaccatggagacccgtgcactcttgttttgcttaggaaccagggagaagaccgaaagggaaaaggatttgaacatgctggattcggactgcagaagaacaccaacttgtgacggtcaccacggtcacatgcgggctcggattggaatgttcaagcacaacatggaaagcctatctgttctgaggccgccgtaatcattgtttccttaccgagacatttcctgccttttctgcccatggtgctgcgtgaccctattttgccccaatgggtcgtgtatcaagttggatccattagggacgcatcctagggttgcagca

SEQ ID NO: 480 - DNA, 1552 bp, Zea mays
  source (0)...(0): Zea mays BAC clone full insert sequence contig bacm.pk155.l13.fis44
  misc_feature (1)...(1552): n = A,T,C or G
catgcccaatccactactttaggtccaaaactcatgtttggggtggtttcgcgcaatttcgttgccgcacgtcactcattccgaaaatgggtgttgggttgcattcaaagcacgagtttttgccaccggaaccatttgttcgtttttcgcaacgaacatgcccaatccactactttaggtccaaaactcatgtttggggtggtttcgcgcaatttcgttgtcgcacgtcactcattccaaaaacgggtgtcgcggtgcatacaaaacacgagttttggccaccggaaccatttctttgtttttcgcaacgaaaatgcccaatccactactttaggtccaaaactcatgtttggggtggtttcgcgcaattttgttgccgcacgtcactcattccgaaaacgggtgtcgcggtgcatacaaagcacgagttnnnnnnnnnnnnnnnnnnnnnnnnnnnnncgcaacgaacatgcccaatccactactttaggtccaaaactcgtgtttggggtagtttcgcgcaatttcgttgccgcacgtcacccattccgaaaatgggtgtcggggtgcatacaaagcacgagtttttgccaccggaaccatttcttcgtttttcgcaacgaacatgcccaatccactactttaggtccaaaactcatgtttggggtggtttcgcgcaatttcgttgccgcacgtcactcatttcgaaaatgggtgttgggttacattcaaagcacgaatttttgccaccgtaaccatctgttcgtttttcgcaacgaacatgatatagctgaggtgcccgatctttcggcgagtagagataattccgatttggcggaagatgacccttgcgatccgactacgacgagcaagcccgaggcgccaatgcaatcgctgaaccaactccctgtggttaccgaccttgctgatgcaagatcggcctgatcgcgaagatcgtttcctgtgcgcaatcgaagaacgaacaagaaaaagatgcgagcaatctaatctattatacgagggtggagttctgaatacacgaagacagtgcagatttgcgcgtgttcgagagtagctaaggctaacgtaaaacaaaactcgaaaataaaggaggcgcagctcctggataaatagagggggcgcagcccctaggggcgggccaaccctaggtcgtccactatgggccgcagttgggctggtcgtctattcttctgggccctcattcttcagtagcatgatgaagttaagatctctggcatgggccgaagtgattggcctagctaatgaaggaagtggcgcttgatgtggaggtgctgctggtgtagtcgtactcataatgatgtcctcatcatcctccccttcttgaagtgaagtcgtcctcgacgacaactcctcatcctcggccatatatggtttcaaatctgcaacattaaaactagtggaaacaccaaattccgcaggcaggtcaaggacataagcattatcattaatctttgttagcaccttaaaaggaccagcagcacgaggcattaatttagaacgacgcaaagta

SEQ ID NO: 481 - DNA, 1297 bp, Zea mays
  source (0)...(0): Zea mays BAC clone full insert sequence contig bacm.pk155.l13.fis45
  misc_feature (1)...(1297): n = A,T,C or G
tcagtaggaggccacaagctcaaggatatattgtattagtttattttccccacaaatataggttattggaccatagattggtttttagaagcaaggttacattaggcactaggtgttctaccgtgtctgccctcctctggtctccactgcctctgcataacctcccggcctccccacatcaccccgtctcttaggcacgcctatggcttgcctcctctttgtcgtgcctgcctctagcctcctcccggccacgcctgtctccgctcccagccactgtcctccctcatgcagcgcagctgtggatctgggggcatgagtgcatgacacctatcatctgcctaccccttaggtgagacagtgcctcctcttcctagcgcctaangctatgngcagcagatcgtgcatacgaccctgcaaaacattgttgcactgtatactgcaatgtttacaaggtagagtttgaaataagagatgaggatgagtaagctgctgaagattgcctaagtgcgcctaagcgagcgccttatagcgcgttgtggaacaccgattaggaggggataaatatatggaactttaattggaggagattaggcagagcaacatatttgttgctgtgcttcccctccctcaggtcacatgccccctctgcatcaggttcaaccctgtctcccacttctaactttctcactatcccccactcctacctgtctcccagacaacttaaacaatagcgacaattctatcattatgagtagccaccaggtttttggattttactggtgaatggttcaacaatatttaattgatatttaacatttgctccgttgtgtagggtctaattaatcaactcaaggaggctattccagcaatgcagcagtctatagacgaactctcagaagaagtgaatagtgtatctattaactcaatggaccaattgaactcgaggctgccactgccagtacaaattgcagggtttggccatgctgctgctgtgcttgcccacgcgcggggacaaggcaggcgcggagcagggcacgacgaccacgcgtccaggcgcgtgccacgtggcgcttaccatttgctcgggctgcaggcgagctagggacaaaacgagagcacgaggcgtcgtccagctctatcagtcttctctcctctctaccagctacaactttactataggggttagtgtggattagctactagattttgaactacaagcctcccactcaagcgtaagatnccgtcgccntcccgcgagtcggaagtacccacttcgccctgtaggagtcgtttcggc

SEQ ID NO: 482 - DNA, 1666 bp, Zea mays
  source (0)...(0): Zea mays BAC clone full insert sequence contig bacm.pk155.l13.fis46
  misc_feature (1)...(1666): n = A,T,C or G
cgactacataaatagaggttggggtggtttcgcgcaatttcgttgccgcacgtcaccccctccgaaaataggtgtcgggttgcatacaaagcacgagtttttgccaccggatcaatttcttcgtttttcgcaacgaacatgcccaatccactacttttggtccaaaacacatgtttggggtggtttcacgcaatttcgttgccgcacgtcacccattccgaaaacgggtgtcggggtgcatacaaagaacgagtttttgccaccggatcaatttcttcgtttttcgcaacgaacatgctgaatccactactttaggtccaaaacacatgtttggggtggtttcacgcaatttagttgccgcccgtcacccattccgaaaacgggtgtcgggggtgcatacaagcacgagtttttgccaccggaaccacttcttcgtttttcgcaatgaacatgctcaatccgcttctttaggtccaaactcatgtttggggtggtttcgcgcaatttctttgccgtacgtcactcattccgaaaacgggtgtcgcagtgcatagaaagcacgagtttttgccaccaggacccatttcttcgtttttcgcaacgaacatgcccaatccactactttaggtccaaaactcatgtttggggtggtttcgcgcaatttcgttgctgcacgtcacccattccgaaaacgggtgtcggggtgcatacaagcacgagtttttgccaccggaaccatttcttcgtttttcgcaacgaacattcacaatccactactttaggtccaaaactcatgtttggggtggtttcgcgcaatttcgttgccatacgtcactcattccgaaaacgggtgtcgcagtgcatacaaagcaggagtttttgccaccggaaccatttctttgtttttcgcaacgaacatgcccaatccactactttaggtccaaaacacctgtttggggtggtttcgcgcaattttgttgctgcacgtcacccattccgaaaacgggtgtcgggatgcatacaaagcacgagtttttgccaccggaaccatttnttcgtttttcgcaacgaacatgcccaatccactactttaggtccaaaactcatgtttggggtggtttcgcgcaatttcgttgccgcacgtcactcattccgaaaatgggtgtcggggtgcatacaagcacgagttttttgccaccagaaacatttctttgtttttcgcaacgaacattcccaatccactactttaggtccaaaacacatgtttggggtggtttcgcgcaatttcgttgtcccacgtcacccattccgaaaacgggtgtcgctgtgcatacaaagcacgagtttttgccaccggaaccatttcttcgtttttcgcaacgaacaagcccaatccactactttaggtccaaaacacatgtttggggtggtttcgcgcaatttccttgccgcacgtcaccaattccgaaaatgggtgtcggggtgcatacaagcacgagtttttgccacttgaaccatttcttcgttttcgcaacgaacatgcccaatccactactttaggtccaaaactcatgtttggggtggtttcgcgcaatttcgttgccgcacgtcactcattccgaaaacgggtgtcgcggtgcatacaaagcacaagtttttgccaccg

SEQ ID NO: 483 - DNA, 1123 bp, Zea mays
  source (0)...(0): Zea mays BAC clone full insert sequence contig bacm.pk155.l13.fis47
gacgccgaaacgactcctatagggcgaatgggacctcacacccgtcgggcaggatcgttaccttgatttgtatgcaccccgacacccgttttcggaatgggtgacgtgggacaatgaaattgcgcgaaaccaccccaaacatgtgttttggacctaaagtagtggattgggaatgttcgttgcgaaaaacgaaaaaatggttccggtggcaaaaactcgtgcttgtatgcaccccgacacccgttttcggaataggtgacgtgcgacaacgaaattgcgcgaaaccaccccaaacatgagttttggacctaaagtattggattgggcatgttcgttgcgaaaaacgaagaaatggtttcggtggcaaaaactcgtgctttgtatgcaccccgacacccgttttcggaatgggtgacatgcggcaacgaaattgcgcgaaaccaccccaaacatgagttttggacctaaattactggattgggcatgttcgttgcgaaaaacgaagaaatggttccggtggcaaaaaatcgtgctttgtatgcaccctgacacccgttttcggaaagggtgacgtgcggcaacgaaattgcgcgaaatcgacatgagttttggacctaaagtagtggattgggcatgttcgttgcgaaaaacgaaaaaatggttctggtggcaaaaactcgtgcttgaatgcaccccgacacccgttttcggaatgggtgacgtgcggcaacgaaattgcgcgaaaccaccccaaacatgtgttttggacctaagtagtggattgggaaatgtcgttgcgaaaaacgaaaaaatggttccggtggcaaaaacacatgctttgtatgcaccccgacacccggtttcggaatgggtgacgtgcgacaacgaaattgcgcgaaaccaccccaaacatgtgttttggacctaaagtattggattgggcatgttcgttgcgaaaaacgaagaaatggtttcggtggcaaaaactcttgctttgtatgcaccccgacacccgttttcggaatgggtgacatgcggcaatgaaattgcgcgaaaccaccccaaacatgtgttttggacctaaagtagaggattgggcatgttcgttgcgaaaaacgaagaa

SEQ ID NO: 484 - DNA, 1432 bp, Zea mays
  source (0)...(0): Zea mays BAC clone full insert sequence contig bacm.pk155.l13.fis48
  misc_feature (1)...(1432): n = A,T,C or G
tcgacgataacaccgacaaagagctcaggctggcgagggaagcagcgcgagagcaggcggcacagtgggcagccgcgcatccccatgggggcgcgcgtggcggcagctcggataggcgccgacgcgctgacggcgctccaggcgggggcgcacgcggcggcggcctagacgggcgtagacgcgccagcggtgctcccggcggcggcgatcgagtcgacggagatcgcggcctctacaggcggcacggttctccctccccggatcggtaccatggtcgccgcatggcccaggccattgtcagggacatcggtcccggcggtgggtggcctaccctcaccaagaccaactacgtcgagtgggccgcggtgatgagggtacggctccaggttcgccacatgtgggaagcagttcgttacgacgacgtcgactaccacgaggatcggcgggcgttggatgccctcattgctgcagtcccgcccgagatgcagttttcgctttcccagaagcggactgccaaggaggcctgggacgccatcgctgcgacccgcatcggcagcgatcgtgcccgcaagaccacactacaggcacttcgcaaggagtgggagaacctggccttcaagccaggtgaggatgttgatgactttgctctccgcctcaacactctgttgcagaagatggtgcagttcggcgacgacacctacgatgaggagagagctgttgagaaggtcttccgttgcatccccgagaagtacaagcagattgctcgctcgatcgagtctctgctagacctctccacgatgacgatcgaagaggcgattggtcgcctcaaggtggtcgacggcgacgaaccacaggctctctctgggcctatcactatcggcgggaagctacatctcactcgggagcagtgggaggtctgccagggtgacaagaagaaggaggagtcctcctcgacacgaggccgcaaacgcggcaagccgcgcaaggcgcgtggaggcgcccaggccggggcgcgaggacacgctgagggtggtgcacgtggaggtgcccaaggcggcgccgtcggcaacaagaagccggcacgagacgacggctgccacaactgcggcaagcttggccactgggccagggattgtcggcagccacgacgtggccaggccaacgtcgcacaggcggaagccngaaggaggaggccctgcntcctggcacatgcaagcatcgagccatctccagcggcaccggccgcagcggcactcctcccacttgatgagtcgaaagcacgcgcttttcttgggcgacgaatcaaaaaaaaatgatccaaaggaggggcctttaaaccggggccacttatcaatggaccgccgaacgggattcttcaccagctgaccctgcggccgaagctcctcagttggggaaccctcggcgaaaaata

SEQ ID NO: 485 - DNA, 1071 bp, Zea mays
  source (0)...(0): Zea mays BAC clone full insert sequence contig bacm.pk155.l13.fis49
gcagtcccgaatcatgtgcccaaaccctctgcaacgatggcactgaatatctcgtgtacgtcctgtggaagaagcggcgcctttggcagggggcaccactggcttggtcgtccctgtgcgcgatgtagtgctaggcgtagaaggtgcagggctggaaggagttgacctgtgtgtcggaccccggcctgcaaaagagttagtatatgtctttgatcgtcgtccttgcacttcacgttcagctttgcaagcatattcaaacaatgtggttatatcaaaataatccttataatcaagtatattctgaaatttccctgttcaaaccaccacgaaaacgcgccatagcagcgtcatccgactcaaccaaaaccacaacgaagcatacccttttgtaactcctggtaatattcctcaacagatagtgaaccttgttgaaaacgctgcattttgttaagcaaatcacgagcataataggaaggaacaaatctgtggcgcatggcagattttaattgggtccaagtaatgacactgttaatgggaagtttttgtttatactcacgccactaaattaaagcaaaatcagtaaattcactaatggcagccttcacttggctattagcaggaatatcatggcatgaaaatttctgttctacctccaattcccaatcaagatatgcagcaggatcatatttaccattaaaagatggaattttaaatttaatcttagaaaataagtcattagggggatgatgaaccacacggcgtgcacgacctcggcgatctccatcgtcctgctcagtgtcaccgccgtattcctgctctatctttgtggtcaacgcatcaaggcgtgccaggatagtgtcgagtgtggtgcgagtcgccgtttaagcaaggtcaagttggttgaaacgctcggtcgtggaagtgaccgttgaatcaagccgttcatgcatcgtcctaatgtcagcagcaagtccatcaacttgtcccttacttcctgcaactcggcatccaccatgtcgtgtgctcctgccataattagcgcaaacaccaaaacaccaaaaggagaaaaac

SEQ ID NO: 486 - DNA, 2696 bp, Zea mays
  source (0)...(0): Zea mays BAC clone full insert sequence contig bacm.pk155.l13.fis50
  misc_feature (1)...(2696): n = A,T,C or G
gaggatcgattcctaagaagcggtgctgcacgtcacccattccgaaaacgggtgtcggggtgcatacatgcacgagtttttgccaccggaaccatttcttcgtttttcgcaacaaacatgtccaatccactactttaggtccaaaactcatgtttggggtggtttctcgcaatttcgttgccgcacgccactcattccgaaaatgggtgtcgggtgcatacaaagcacgagtttttgccaccggaaccatttcttcgtttttcgcaacgaacatgcccaatccactactttaggtccaaaacacctgtttggggtggtttcgcgcaatttcgttgctgcacgtcacccattccgaaaacgggtgtcggggtgcatacaaagcacgagtttttgccacaggaaccatttcttcgtttttcgcaatgaagatgcccaatccactactttaagtccaaaactcatgtttggggtggtttcgcgcaatttcgttgccgtacgtcactcattccaaaaacgagtgtcggggtgcatacaaagcacgagtttttgccaccggaaacatttctttgtttttcgcaacgaacatgcccaatccactacattagctccaaaactcatgtttggggtggtttcacgcaatttcgttgccacacgtcacttaatccgaaaacgggtgtcgcggtgcatacaaagcacgagtttttgccaccggaaccatttcttcgtttttcgcaacgaacatgcccaatccactactttaggtccaaaacacaagtttggggtcgtttcgcgcattttcgttgccggacgtcacccattccgaaaacgggtgtcggggtgcatacaaagcacgagtttttgccaccggaaccattttttcatttttcacaacgaacatgcccaatccactactttaggtccaaaactcatgtttggggtggtttcgcgcaatttcgttgccgcacgtcactcattccgaaaatgggtgttgggttgcattcaaagcacgagtttttgccaccggaaccatttgttcgtttttcgcaacgaacatgcccaatccactactttaggtccaaaattcatgtttggggtggtttcgcgcaatttcgttgtcgcacgtcactcattccaaaaacgggtgtcgcagtgcatacaaaacacgagttttggccaccggaaccatttctttgtttttcgcaacgaaaatgcccaatccactactttaggtccaaaactcatgtttggggtagtttcgcgcaattttgttgccgcacgtcactcattccgaaaacgggtgtcgcggtgcatacaaagcacgagttnnnnnnnnnnnnnnnnnnnnnnnnnnnnncgcaacgaacatgcccaatccactactttaggtccaaaacacatgtttggggtggtttcgcgcaatttcgttgccgcacgtcactcattccgaaaacgggtgtcggggtggatacaagcacgagtttttaccaccgaaaccatttcctcgtttttcgcaacgaaaatgcccaatccactactttaggtccaaaacacatgtttggggtggtttcgcgcaatttcgttgccgcacgtcacccattccgaaaacgggtgtcggggtgcatacaaagcacgagtttttgccaccggaaccatttcttcgtttttcacaacgaacatgcccaatccagtactttaggtccaaaactcatgtttggggtggtttcgcgctatttcgttgccgcacgtcacccattccgaaaacaggtgtcagggtgcatacaagcacgagtttttgccaccggaaccatttcttcgttttttcgcaacgaacatgcccaatccactaatttaggtccaaaactcatgtttggggtggtttcgcgcaatttcgttgccgcacgtcactcattacgaaaatgggtgtcggggtgcatacaaagcacgagtttttgccatcagatcaatttcttcgtttttcgcaacgaacatggcgaatccactactttaggtccaaaacacatgtttggggtggtttcacgcaatttncgtgccgcacgtcacccattccgaaaacgggtgtcggggtgcatacaagcacgagtttttgccaccggaaccatttcttcgtttttcgcaacgaacatgctcaatccactactttaagtccataactcatgtttggggtggtttcgcgcaatttcgttgccacacgtcacccattccgaaaacgggtgtcggggtgcatacaagcacgagtttttgccaccggaaccatttcttcgtttttcgcaacgaacatgcccaatccactactttaggtcaaaaactaatgtttggggtggtttcgcgcaatttcgttgccgcacgtcacccattccgaaaacggatgtcggggtgcatacaagcacgagtttttgccaccgaaaccatttcttcgtttttcgcaacgaacatgcccaatcctctactttaggtccagaacacatgtttggggtggtttcgcgcaatttcattgccgcatgtcacccattccgaaaacgggtgtcggggtgcatacaaaaagcacgagtttttgccaccagaaccatttcttcgtttttcgcaagaacatgcccaatcaatactttaggtccaaaactcattttttggggtggtttcgcagaatttcgttgccgcacgtcaccttttcgaaaaag

SEQ ID NO: 487 - DNA, 1834 bp, Zea mays
  source (0)...(0): Zea mays BAC clone full insert sequence contig bacm.pk155.l13.fis51
  misc_feature (1)...(1834): n = A,T,C or G
tcctcgttccagaaacgttcattccattccaggaacgcaggaacaatctcgtccccgtagtgtaaaatctgttttaagtatcgtagcacgttcccgttcctcgaccccatcgatccgagaacctggttactaagagcatgcccacatccaaaacctcatactaaaagagtcactaaaggtcataatagaaatattctacaagattgttgaaattctctcaaatgcattactccatgaagcataacacagaaatgctagctcaggaatttaccatgttgtgtgaataggagggataaccacagttaaaatatgcttcagtttacggaagagtgaggtcagtaaggaaactcttctctcaaaagggagtcaattataggccactgcacttttagcactaaaagctttaccatcccttctgttatattgatcttataccaccacccatcagtattgtgtaattttgatgttgagttggccattttgcatgtcccatttattcctccacttaactctacttctccaaacaagccattgtggcaacaaggggtgacagcaagcatggtctgtgatcaattataactggatgaacagaaaatatggaagctgtttacatacaaggcctatataagtatataactcttcttttggaggggtacgatttttatgtgtttgcaccttagcccccaggtgagtcaagggcgtgtaatgtcattctgaatggattgtttaggataagttgttttatgtcaggtgaacatggatagaaaaaacttgctattagttgagagaatctttgcaaatccatcctattaagcatcagcaatctatttatcctattgtagtgatgaactactaagcattagcattcattatttatcttgaaaccagcaccacatgacatttggttgagacaatgcacttggatataaacaatctatgtcacatctagtttcgtctatatttcaaaaagtgtttccaaggatccaatgaagctaagttgcagtagatcccaaccgaccaaaacaaatgacacccagcctagtccactggtccactaacctcggtccgcagcatgtggcaagtgacgagaccctagaattgctccgaggcagtgccccatgctgttccagctcgctgatgatcccttgcacgatctaagcaaccaatcaccggcaaagggccaacaaacatcaaaacatcacattttattaaacaaagaaatgtgaaacaaactgcagaaatcccaccttcctgaactccctggactgagcggagtcgaagattggccagaccttgtcaaaatcctgtgttgaatgccaaccaaaccaaatcaaaggtcaggaaagcccaaaaaaatacgcaaacacaagggaaccgaaaattcggaagagccagcggattgccttcgcggactgcgcggggccgcggagcgaggagagaaggaagtagaggagttgctcgccaaggcgggggttggagtgacgaaataggcccacgcggccggcgggggaagagggagagccgaggaccgcgggatcgaggccgaggagtaggcagttagtgtacatggcgccctccagctccgcctcgcgctccttctcccgatccgccgccatggctgcacttgctctccacggggtgggggtgcgggtaggtagagcagctaggtttacagggagaagggcgccattggaggccgagccgtcagatctcgcngaaggtggnaagggggagaaaaaaacagcaaccgaggaggcgaacggtcaggccccgggtcagggggattgaagctaattccatacattctccctctcatctccctctgtttaatttt

SEQ ID NO: 488 - DNA, 1743 bp, Zea mays
  source (0)...(0): Zea mays BAC clone full insert sequence contig bacm.pk155.l13.fis52
caacatgagttcttcccaaataagatgtgctagacatataatcaataaagcatgaataatttcaaacgatggtacccaattaggaatatggatacgaacacaaatagcacaaacataatcaagtatgagactcttcaatcaaaagacgaaataaccatcactgttttacttgcctttaccgaagttcgggcaaaatccctaagaacgatccggaagtccaccacctgtttttgacacccaacttagtgcaccaaattctcatgaaaaaaactcaaagacaacaccgcacctacgtgcaatctcaacccccgccgcggtaacaattctcccctcactaaccaaactgcagcggcgctgcttaaccattccataacttaaaatttaggacagcagtgatgataaacaaaaacttcagagacaactacataaaattccccacaagttttgtatacaactcatgattgaattctaacatctacttacctctaaacggtcctcaaaataaaccctgcaatctgtttttttttcctgatttgagcagcgacatacgcggattcaaacagcgataacttttaaaatataattccgatttgaacgcataagtacttgttggaaagataagaaaaagccctacatgattcttatactgattaacactaattactcccgaaacatccccagaaactgctaacactgctgctgttcatcactctgaaaaatctgttttctggacagccacatacccggattcaaacgatgataacttttaatttataactccaaattgagcgcataaatactcgttggaaagataaaacaaagttctacaagattctcatactgattaacactaattgctcccaaaaaatccccagaaactgctaacactgctgctgttcatcactctgaaaaatctgttttctggacagccacatacccggattcaaacgatgataacttttaatttataactccaaattgagcgcataaatactcgttggaaagataaaacaaagttctacaagattcccaaattgatccccattaaatcttcacgaaaaaaactaaaaactgctggaactaccgctgttcatccaccacgcaaaattctggacagcccccctctatctaatcgcaaacgcaacatctaatcaattgaatcgcagcgcaaatgaacaagggatgaacacaaaagaaaaatcaccttgggttctccccttttccttcctcccttcttccttccaccaaaacgattggagattcgcaccaaaagacgatgatatatccgagcggcacggagtagcacctagggaggaggggattggggggggggggctagggttttggtggctgcaacaatggaaggaggaagaagtgggcaaggggggcggccgccaaagggaaaagaagaatgggggggggccgcttcccatgggggggtaattaagaaggtggcggctaaggtttgggagggctaatgggcccaaacacccattgtgggccaaataaaccacgcgacagctcccgaccgtaacgccaacgtcaaacccaaaaaattctactggcccaatttcgaaaggtgttcacaaaattcccaatcccccaaacaacaactgggtggaggggaaaaaaccaaaaagaacaacccccaaattctttttcttgtaaaacgggggatacattttacccctccttaaaagaatcgaacctcaaattttgagctttctatccgaatgacacaag

SEQ ID NO: 489 - DNA, 1841 bp, Zea mays
  source (0)...(0): Zea mays BAC clone full insert sequence contig bacm.pk155.l13.fis53
  misc_feature (1)...(1841): n = A,T,C or G
tctgggacggatcgtaacactagcgagggagagaatagggaatttccccccccccccctcagaagaggagttatagcctttttcgtggctgttgatcgattctccaaatggctcatttcaagggtgggagggagtgatgatgctagcaatgttgctgaattgttttttagagagattattcgtttgcacggtattcccaatacaatagtctcggatcgtgatgccaagtttctgagtcatttttggagatctctgtggaataaattaggaactaaattgctgtttagcaccacttgtcaccctcagactgatggtcaaactgaggtagttaatcgaactttgtctaccatgcttagggctgttttagacaaaaatttgaaacgttgggaggattgcttacctcatgttgagtttgcttataatcatgcaacacattcttctacaaagatgtgcccttttcaaattgtttatggttacattcctagggcgcctattgctttgttttcgcttgatgctacggacgccccacacatagatgctcttgcacatgttgaacaaatgattaatctccatgaacaaactcaacaaaacattgctgttgctaatgctaaatatcagattactggtagtaaaggccggaaactagttaattttgaacctggtgatatggtttggttgcatttgagaaaggatcgttttcctactttgcgccgttctaaattgatgcctcgtgctgctggtccttttaaggtactaaccaagattaatgataatgcttatatccttgacctacctgcggagtttggtgtttccactagttttaatgttgcagatttgaaaccgtatgcgggagaagatgaggagttgccgtcgaggacgacttcagttcaagaaggggaggatgatgaggacatcaacaccaacacgagtacatctacaccagcagcaccttctccagcccaggcaccatcttccccagtccaggcgccaccccttccacctgggccagtgactcgggcccgtgcaagagaattgaactacatcatgttgttaaagaacgaaggcccggaagaatagacgaccagcccaattgcggcccataatggacgacctagggttggccgcccctaggggctgcgccccctctctatttattcaggagctgcgcctcctttatttcccgagttttgttttacgttagccttagctactctcgaacacgcgcaaatctgcgctgtcttcgtgtatccagaactccaccctcgagtaatagattagattgctcgcatctttttcttgttcgttcttcgattgcgcacaggaaacgatcttcgtgatcaggccgatctcgcatcagcaaggtcggtaaccacagggagttggttcagcgattgcattggcgcctcgggcttgctcgtcgtagtcggatcgcaagggtcatcttccgccaaatcggaattatctctactcgccgaaagatcgggcacctcagctacatcaattggtatcagatttccaggttgatcggtgagtttatcgagcgttttttttcctacagtccacaaaaccacataaaaattcaggttagatcttaccccggcacccttttgagcctcgcactttcttttcataatctgcattgttgaatttgtgtgctttcgcgtcatttgntgctggntgcattgtgttcttcccacattcaaaccctagcgcccgcaccatctcccgtttgatcacngcacanaccgagagcacacagcgtttccattattttctccntcggntacgtccaaaaaaaaccgaanaaaacaacctgagtcacggccgttttcctggatttt

SEQ ID NO: 490 - DNA, 2014 bp, Zea mays
  source (0)...(0): Zea mays BAC clone full insert sequence contig bacm.pk155.l13.fis54
  misc_feature (1)...(2014): n = A,T,C or G
aaagcgtgcgagactttgacgaattttttctttattttcctgaatttttttgacaattttgtcgaaccccaaacagaccgtaggtgagtttggccggcctcagaatggtgtcaactaactcctgtaaaaatttcagattttttggacacccgagcgaaaagttatgcccggtttatggaaggttcctcaagttatgttttaaaaacgaccgggatgaaacaaacgtatcctttctccttcgttttcttttttttgtttctgttttttttatgtaaccgaaggagaaaaacaaggaagcggtcgttgactcggtttgttttttttctgtttttttcgtaaccgaaggagaaaatcaaggaaacggccgttgactcggtctgttttttctgtttttttttgacgtaaccgaaggagaaaaacaaggaaacaatgttgactcggtttgtggcgtgatcaaacgggagatggtggcggcgctagggtttgaatggtggaagaacacaatgcaaccagcaacaaatgacgcgaaagcacacaaattcaacaatgcagattattgaaagaaagtgcgaggctcaaaagggtgctgggataagatctaacctgaatttttatgcggttttgtggactgtaggaaaaaaaacgctcgataaactcaccgatcaacctggaaatctgataccaattgatgtagctgaggtgcccgatctttcggcgagtagagataattccgatttggcggaagatgacccttgcgatccgactacgacgagcaagcccgaggcgccaatgcaatcgctgaaccaactccctgtggttaccgaccttgctgatgcgagatcggcctgatcacgaagatcgtttcctgtgcgcaatcgaagaacgaacaagaaaaagatgcgagcaatctaatctattactcgagggtggagttctgaatacacgaagacagcgcagatttgcgcgtgttcgagagtagctaaggctaacgtaaaacaaaactcgaaaataaaggagacgcagctcctggataaatagagggggcgcgccccctaggggcggccaaccctaggtcgtccactatgggccgcagttgggctggtcgtctattcatctgggccctcattcttcagtagcatgacgaagttaagatctctggcacgggccctagtgattggcccagctaatgaaggaagttgcgcttgatgtggaggtgctgctggtgtagtcgtactcatagtgatgtcctcatcagacggtgttgagacggtcacggagcttagtgctgagccccctcctaaacatgtccctcttcttctcgtccgcgtttgcatgatatccggcatactggcacaggtcattgaaggcctgagcatactataacaatgttcggtttccctgagtgagtgccagaaactcgttgagctttcggtccataatgcctgctggtatatggtgccccctgaaagctgccttgaactctctccattccacctctcggtcatctggctgcatagcaagaaaatggtcccaccaggtccttgcgggtccgcgaagctactgggtggcgaacctgaccttagtgacctctgagcaaactccatggagtagcgagaatttggattccactactctcaaccatacatccgcatcaagtgggtcctctgccctggtgaacaatggtggctgggtactgaggaactcctggtaggtggctgccgcggacgctgatgatcactaccaccatagtgctgaggtggcggctgacgctgagctagttgcctcaagatctcattctgctgagccattagctcctgcagcgtaggaggcggtggcggcggtggaggaacgcgctcattttgaccacgacgcgctctcccggccatctaaaagaatcacatatatttttaataacacatctttgaggttcaggnnntcatcacggtgaaagaagtcaaaggcgaaactgatagattcttgcataaatcataaagactcacatggcataactttc

SEQ ID NO: 491 - DNA, 2270 bp, Zea mays
  source (0)...(0): Zea mays BAC clone full insert sequence contig bacm.pk155.l13.fis55
  misc_feature (1)...(2270): n = A,T,C or G
gtttggggtgtttcgggcaatttcgttgccgcacgtcacccctttcgaaaataggtgtcgggtgatacaaagcacgagttttgccacggataattctcgttttcgcaacgacatccatcatactttggccaaaaatgttgggtggttcgcgcaatttcgttgccggtcacccattccgaagatgggtgtcggcgtgcatacaaagcacgagtttttgcctccggagcaatttcttcgtttttcgcaacaaacatgcccaatccactactttaggtccaaaactcatgtttggggtggtttcgcgcaatttcgttgccgcacgtcactcattccgaaaatgggtgttgggttgcatacaaagcacgagtttttgccaccgaaactgtttcttcgtttttcacaacgaacatgcccaatccactactttaggtccaaaactcatgtttggggtggtttcgcgcaatttcgttgccgcacgtcaccccttccgaaaacaggtgtcggggtgcatacaaatcacgagtttttgccaccggaacaatttcttcgtttttcccaaacaacatgcccaatccactaatttaggtccaaaactcatgtttggggtggtttcgcgcaatttcgttgccgcacgtcactcattacgaaaatgggtgtcggggtgcatacaaagcacgagtttttgccatcagatcaatttcttcgtttttcgcaacgaacatggcgaatccactactttaggtccaaaacacaagtttggggtggtttcacgcaatttcgttgccgcacgtcacccattccgaanacgggtgtcgagggtgcatacaagcacgagtttttgccaccggaaccatttcttcgtttttcgcaacgaacatgctcaatccacttctttaggtcaaaactcatgtttgnggtgtttcgcgcaatttcgttgccatacgtcactcattccgaaaacgggtgtcgcagtgcatacaaagcaggagtttttgccaccggaaccatttctttgtttttcgcaacaaacatgcccaatcaactactttaggtccaaaacacctgtttggggtggtttcgcgcaattttgttgctgcacgtcacccattccgaaaacgggtgtcgggatgcatacaagcacgagtttttgccaccggaaccatttcttcgtttttcgcaacgaacatgcccaatccactactttaggtccaaaactcatgtttggggtggtttcgcgcaatttcgttgccgcacgtcactcattccgaaaatgggtgtcggggtgcatacaaagcacgagtttttgccaccagaatcatttctttgtttttcgcaacgaacatgcccaatccactaatttaggtccaaaactcatgtttggggtggtttcgcgcaatttcgttgccgcatgtcacccattccgaaaacgggtgtcggggtgcgtacaaagcacgagtttttgccaccggaaccatttcttcgtttttcgcaacgaacatgctgaatcctctactttaggtccaaaacacatgtttggggtggtttcacgcaatttcattgccgcatgtcacccattccgaaaacgggtgtcggggtgcatacaaagcacgagtttttgccaccgaaaccatttcttcgtttttcgcaacgaacatgcccaatccaatactttaggtccaaaactcatgtttggggtggtttcgcgcaatttcgttgtcgcacgtcacctattccgaaaacgggtgtcggggtgcatacaagcacgagtttttgccaccggaaccattttttcgtttttcgcaacgaacattcccaatccactactttaggtccaaaacacatgtttggggtggtttcgcgcaatttcattgtcccacgtcacccattccgaaaacgggtgtcggggtgcatacaagcacgagtttttgccaccggaaccattttttcgtttttcgcaacgaacattcccaatccactactttaggtccaaaacacatgtttggggtggtttcgcgcaatttcgttgtcccacgtcacccatccgaaaacgggtgtcggggtgcatacaagcacgagtttttgccaccggaaccatttcttcgtttttcgcaacgaacatgcccaatccactactttaggtccaaaactcatgcttggggtggtttcacgcaatttcgttgccgcacgtcacccattccgaaaacgggtgtcggggtgcattcaagcacgagtttttgccaccagaaccattttttcgcctatcagtgtaa

SEQ ID NO: 492 - DNA, 1451 bp, Zea mays
  source (0)...(0): Zea mays BAC clone full insert sequence contig bacm.pk155.l13.fis56
ttgggaaacacatctggaaactcagacacaatcttgatcctctcaattgggtctgcttcactgctatcaacgaccatctgataacaacttcctttctttggctcaggcgggactaactcggtcactacttcctctcctagtggagacaccaacttgattgtcctcttatcacaactgataactgcctgatacttatctagccaattcatccctaagatgacatctattccctgagtacccattactatgaggttggtgggaaacgctatcccccttatttccacacttacattcaaacatatgctatcagttcgaattctaccaccggctgagtcaatttgaatgggggttgacatggtagtaattggaagattatgtgcttctacccatgatgtagtaatgaaagaatgcattgccccagtatcaaataatatttctacaatatgggagtcgaatgggaacatacctactatcatgccgggggtctcctgaactccttcagcctccaagtgattcagtcttccatgattgtaacgcggctgagagcggttgcctgctccaggctgagacacattctgctttgctagggcattggggcctgactgctgctgggctgccttcttcggacattgcatcacccagtggccttgatctccacagtggaaacatgccctgtttccaacctgagctggtgctgcctgactgttctgctggtttgctggggcaggaagacgaggtgcctgctgattctgcctctgaagctgacctcctgactgattgccctgacggttctgatactggtgctgaggatactgcctttggaactgctgatgttgctgaggtggacgttggttctgcctgaactgctgaggttgattggctgagaaacgaggacggttgctgcttccaggctagggtccactgatcttgcgcttacgatcctccatctccttacgcttcctctctgtcatgattgctctgtcaatcaggtgctggaacgtcgggaaggtatgattcatcaactgatactgaagagggtcaaccaagactctcaggaaacggtactgtcgcttggcgtcggtgttgacatcttcaggagcatagcgagacaactgtagaaacctgtctcgatactcactgactgacatcgacccttgcttaagggccaggaactcctccttcttcactgtcatcagacctgcaggaacatggtactgacgaaagctacctctgaactcttcccaggtgatggcgtcgggttggcatgggtggcgagataagactcccaccatgactgagctgctcctctcaacagacggggaccatacaggactttctccctgtcgtcacactgagcggtatgcaactcccgctccacagtgcgcagccagtcttcagcatccatggggtcagaagagtgagcaaacgttggtggatgacctctcatgaat

SEQ ID NO: 493 - DNA, 1695 bp, Zea mays
  source (0)...(0): Zea mays BAC clone full insert sequence contig bacm.pk155.l13.fis57
ttgcgcaatttcgttgccgcacgtcacccattccaaaaacgagtgtcagggtgcgtataagcacgagtttttgccaccggaaccatttcttcgtttttcgcaacgaacatgctcaatccactactttaggtccaaaactcatgtcagtttcgcgcaatttcgttgctgcacgtcactcattccgaaaactggtgtcggggtgcatacaaagcacgagtttttgccaccggaaccatttcttcgtttttcgcaacgaacatgcccaatccagtaatttaggtccaaaactcatgtttggggtggtttcgcgcaatttcgttgccacacgtcacccattccgaaaacgggtgtcgcggtgcatacaaagcacgagttttcgccaccggaaccatttcttcatttttcgcaacgaacatgcccaatccactaatttaggtccaaaactcatgtttggggtggtttcgcgcaatttcgttgccgcacgtcacccattccgaaaatgggtgttggattgcattcaaagcatgagtttttgccaccgggacatttcttcgtttttcgcaacggacatgcccaatccactactttaggtccaaaacacatgtttggggtggtttcgcgcaatttcgttgccgcacgtcacccattccgaaaacgggtgtcgagttgcattcaaagcacgagtttttgccaccggatccatttcttcgtttttcacaacgaacatgcccaatccactaatttaggtccaaaactcatgtttggggtggtttcgcgcaattttgttgtcgcacgtcactcattccgaaaacgggtgcatacaagcacgagtttttgccaccggaaccatttcttcgttttttgcaacgaacatgcccaatccactactttaggtccaaaactaatgtttggggtggttttgcgtaatttcgttgccgcacgtcacccattccgaaaacggatgtcggggtgcatacaagcacgagtttttgccaccgaaaccatttctttgtttttcgcaacgaacatgcccaatcctctactttaggtccaaaacacatgtttggggtggtttcgcgcaatttcattgccgcacgtcacccattccgaaaacgggtgtcggggtgcatacaaagcacgagtttttgccaccggaaccatttctacgtttttcgcaacgaacatgcccaatccactactttaggtccaaaactcatgtttggggtggtttcgcgcaatttcgttgtcgcacgtcacctattctgaaaacgggtgtcgggtgcatacaaggacgagtttttgccaccggaaccatttcttcatttttcgcaacgaacattctcaatccactactttaggacccaaacacatgtttgggggtgggttcgcgcaatttcgttgtcgcacgtcacccattccgaaaaaggtgtcggggtgcatacaaacacaagtttttgtcacccgaaccatttcttcgtttttcgcaacaaagattccccatccactactttagggtccaaaaatcatgttttggggggggtttcggccaatttttgttgccgcaacgtcaccccatttctaaaaaagggggttggggggtccttacaagcaccaagtttttttcccccgcgaacattttttttcttttttttccacagaaatgcccccaacccctaatttttggggccaaaacat

SEQ ID NO: 494 - DNA, 2225 bp, Zea mays
  source (0)...(0): Zea mays BAC clone full insert sequence contig bacm.pk155.l13.fis58
  misc_feature (1)...(2225): n = A,T,C or G
tggatgaagtccttggatcaagcaatggccattgagaagatgctccaccgtctcaacccctcaaaggtgagccgatgttccatgaagttcaatgttgaggagcagaggcaaagcaccgccgccggaggccatagcttgacgagagcacaatctgaaaagtagtcaaagagggggcacatatagggattgacttccattgcatacacgggtagccagctcgttggagaagaaagcaatgaaggtgctcggcgcagcccaacgtaggccaatcgcttcagcgtcaatgccagaaccctccggatcgataaaggagacgagtagagcacgtcaaaggtcatctttagcatggcaaatcctcctagagtgcctgatgacacatgggtcggcaatcaccgtcgggcggtagggttagccaccgatggatgtaggggagaatttcagtcgcaactgcctctatatctcctcctctgaccgtggggagtacgccttctctcgccaccaccaaaacccacgccgccgacctccgcattaccaaccatctcacaaccaagggcagccaccagagatgtcgcctaggatacagggcgccacaccaagactcgcctatgctgatgcggagccgtctgccggtgcgggcacacgcaagcatggtgcccaggtgatagtcgcctagagggggggtgaatagggcgaaactgaaatttacaaatataaacacaactacaagccgggttagcgttagaaatataaacgagtccacgagagagggcgcaaaacaaatcgcaagcaaataatgaagtgagacacacggatttgttttaccgaggttcggttcttgcaaacctactccccgttgaggaggccacaaaggccgggtctctttcaacccttccctctctcaaacggtcccttggaccgagtgagcttctcttctcaaatcacttgggaatcaaacttcccgcaagggccaccacacaattggtgcctcttgcctctattacaatgtgagtttttgatcacaagaaagaatcaagatagaagaaagcaatccaagcgcaagagctcgaaagaacacaaggaaatcactctctctagtcactagggttttgtgtgtggaattggagaggatttgatctctttggtgtgtctagaattgaatgctagagctcttgtagtagttgggaagtggaaaacttggatgcaatgaatggtggggtggtttgggtatttatagccccaaccaccaaaagtggtcgttgggaggctgtctgctcgatggcgcaccggacagtccggtgcacaccggacagtccggtgccccctgccacgtcatcactgtcgttggattctgaccgttggagcttctgacttgtgggcccgccttggtgtccggtgcacaccggacatgtactgttggctgtccggtgtgccagcatgggcgattctgacttctgcgcgcgcatttattgctctgcagagagccgttggcgcggagatagccgttgccccggagtcgcaccggacagtccggtgcacaccggacagtccggtgaattatagtggacgagccgttggcttttcccgaagctggcgagttcctgaggccgacctcccttggcgcaccggacactgtccggtgtacaccggacagtccggtgaattatagtcgagtcgcctctgggaatttccgaaggtggagagtttgagtctgagttcccctggtgcaccggacatgtccggtggcacaccggacagtccggtgcgccggaccaggggtgccttcggttgcccctttgctcctttgttgaatccaaaacttggtctttttattggctgagtgtgaaccttttacacctgtataatctatacacttgggcaaactagttagtccgattatttgtgttgggcaattcaaccaccaaaattaattagggactaggtgtaagcctaattccctttcaccaggcaaccggcagaggaaacaccgcacctatcgacgacacgctgctgcgcgatgggacagggagaagcaattgaagcgcttcccgtcttaggttaatagggataggcctgggaggggcttccaaaggggcagggcgaccccggaccaacccccaccattttttcacccttttccaaagtttccccccctcccctcccttggaaaaaaagacacctccgnnncgggggaggggggggggtttttttaaaaaacaccccccccc

SEQ ID NO: 495 - DNA, 1639 bp, Zea mays
  source (0)...(0): Zea mays BAC clone full insert sequence contig bacm.pk155.l13.fis59
ccattccgaaaaacgaggtgtgggggggcatacaaagcacgagtttttgccaccggaaccatttcttcgtttttcgcaacgaacatgccaaaatccagtaatttaggtccaaaactcatgtttggggtggtttcgcgcaatttcgttgccacacgtcacccattccgaaaacgggtgtcgcggtgcatacaaagcacgagttttcgccaccggaaccatttcttcatttttcgcaacgaacatgcccaatccactaatttaggtccaaaactcatgtttggggtggtttcgcgcaatttcgttgccgcacgtcacccattccgaaaatgggtgttggattgcattcaaagcacgagtttttgccaccgggccatttctttgtttttcgcaacgaacatgcccaatccactactttaggtccaaaactcatgtttggggtggtttcgcgcaatttcgttgccgcacgtcactcattccgaaaacgggtgtcgcggtgcatacaaagcacgagtttttgccaccggaaccatttcttcgtttttcgcaacaaacatgcccaatccactacattaggtccaaaacacatgtttggggtggtttcgcgcaatttcgttgccgcacgtcacccattccgaaaacgggtgtcggggtgcatacaaagcatgagtttttgccaccggaaccatttcttcgtttttcgcaatgaacatgcccaatccactactttaggtccaaaactaatgtttggggtggtttcgcgcaatttcgttgccgcacgtcacccattccgaaaaacgggtgtcggggttcatacaagcacgagtttttgccaccgaaaccatttcttcgtttttcgcaacgaacatgcccaatcctctactttaggtccaaaacacatgtttggggtggtttcgcgcaatttcattgccgcacgtcatccattccgaaaacgggtgtcggggtgcttacaaagcacaagtttttgccaccggatcagtttcttcatttttcgcaacgaacatgcccaatccactactttaggtgcaaaactcatgtttgggatggtttcgcgcaatttcgttgccgcacgtcaccaattccgaaaacgggtgtcggggtgcatacaaagcacgagtttttgccactggaaatttctttgtttttcgcaacgaacatgcccaatccactaatttaggtccaaaactcatgtttggggtggtttcgcgcaatttcgttgccgcacgtcacccattctgaaaatgggtgttgggttgcattcaaagcacgagtttttgccaccggaaccatttcttcatttttcgtaacaaacatgcgcaatccactactttaggtccaaaactcatgtgtggggtgggttcacgcaattttgttgccgcacgtcactcattcccgaaacaggtgtcgcggtgcgtacaaagcacgagtttttgccaccggaaccgtttcttcgtctttcgcacgaaaaagcgcaatccactacattaggtgcaaaactcatgtttgaggtgggtttcgcgcaaatttgtttgcgcatgtaacccaatccaaaaagggtgtcggggtgcgtacaaaacacgagtttttgccccaggagcaatttctttgtttttcccaacga

SEQ ID NO: 496 - DNA, 1687 bp, Zea mays
  source (0)...(0): Zea mays BAC clone full insert sequence contig bacm.pk155.l13.fis60
gacgaaccgagctagctggaacacacagcttgttagcgcgaaacaggaacccatcctgtatgtgaaatttgccccatggtatcccattaatacaatggccgaaagcatctttaaaatcaacatcgtcaaaatactgatccttcacagtgtccaaaccaaagattttaaaatctaattgtgacagcatggtatagcgacgagacaaagcatcagcaataacattgtccttcccgttcttgtgtttaataatgtaaggaaaggactcaatgaattcgacccatttagcatgacgacggttcagatttgtttgggtacgaatatgttttaaagcctcatgatcagaatgaattatgaactcactgatgaagctgaggtgcccgatctttcggcgagtagagataattccgatttggcggaagatgacccttgcgatccgactacgacgagcaagcccgaggcgccaatgcaatcgctgaaccaactccctgtggttaccgaccttgctgatgcgagatcggcctgatcacgaagatcgtttcctgtgcacaatcgaagaacgaacaagaaaaagatgcgagcaatctaatctattactcgagggtggagttctgaatacacgaagacagcgcagatttgcgcgtgttcgagagtagctaaggctaacgtaaaacaaaactcggaaaataaaggaggcgcagctcctgaataaatagagagggggcgcagcccctaggggcggccaaccctaggtcgtccattatgggccgcaattgggctagtcgtctattcttccaggccttcgttctttaacaacatgatgtagttcaattctcttgcacgggcccgagtcactggcccaggtggaaggggtggcgcctgggctggagaaggtgctgctggtgtagatgtgctcgtgttggtgttgatgtccgcatcatcctccccttcttgaactgaagtcgtcctcgacggcaactcctcatcttctcccgcatacggtttcaaatctgcaacattaaaactagtggaaacaccaaactccgcaggcaggtcaaggatataagcattatcattaatcttggttagtaccttaaaaggaccagcagcacgaggcatcaatttagaatggcgcaaagtaggaaaacgatcctttctcaaatgcaaccaaaccatatcaccaggttcaaaagtaacatgttttcttcctttactaccagcaacctaattttttgcattagtagcagcaatgttctgtttcgtttgttcatgtatggtaatcatttgttcaacatgtgcagaagcatctacatgtggggcgttcgcagcattaagtgaaatcaaatcaataggtgccctaggaatgtaaccataaacaatctggaaagggcacatctttgtagaagaatgcgtagcatgattgtaagcaaattcaacatgaggcaagcaatcctcccaacgtctcaaattcttgtctaaaacagccctaagcatggtagataaagttctatttactacctcagtttgtccatcagtctgaggtgacaagtagtgctaaacaacaatttagttcccaattttttccaaagagatctccaaaaatggcttagaaacttagcatcgcgatcagagactattgtttttggaataccatgtaaacgaataatttctctaaagaacaattcagcaa

SEQ ID NO: 497 - DNA, 1817 bp, Zea mays
  source (0)...(0): Zea mays BAC clone full insert sequence contig bacm.pk155.l13.fis61
gggtgtttcggcaattttggtgtcggaacgtcacccaatccgaaaaacggtgtcgggggtgcatacaagcacgagtttttgccacccgaaccatttccttgttttttcgaacggaccatgcccaatccactactttaggtccaaaactcatgtttcgggtggttttgcgcaatttcgttgccgcacatcactcattccgaaaataggtgtcgggggtgcatacaaagcaagagtttttgccaccggaaccatttcttcgtttttcgcaacgaacatgcccaatccactactttaggtccagaacacatgtttggggtggtttcgcgcaatttcgttgccgcacgtcacccattccgaaaccgggtgtcggggtgcatacaaagcatgtgtttttgccaccggaaccatttcttcgtttttcgcaacgaacatgcccaatccactacattaggtccaaaacacatgtttggggtggtttcgcgcaatttcgttgccgcacgtcacccattccgaaaacgggtgtcggggtgcatacaaagcactgatgaatcccctaatgattttggtaaaaatcattaagttaaggtggatacacatcttgtcatatgatcaaatggtttcgcgaaaaatcaataatcagacaacaagatgtgcgaactcgatattttacacgactctctttaccaattctgccccgaattacacttaaaacgactcaacagcttaacgttggcttgccacgcattacttgactgtaaaactctcactcttaccgaacttggccgtaacctgccaaccaaagcgagaacaaaacataacatcaaacgaatcgaccgattgttaggtaatcgtcacctccacaaagagcgactcgctgtataccgttggcatgctagctttatctgttcgggcaatacgatgcccattgtacttgttgactggtctgatattcgtgagcaaaaacgacttatggtattgcgagcttcagtcgcactacacggtcgttctgttactctttatgagaaagcgttcccgctttcagagcaatgttcaaagaaagctcatgaccaatttctagccgaccttgcgagcattctaccgagtaacaccacaccgctcattgtcagtgatgctggctttaaagtgccatggtataaatccgttgagaagctgggttggtactggttaagtcgagtaagaggaaaagtacaatatgcagacctaggagcggaaaactggaaacctatcagcaacttacatgatatgtcatctagtcactcaaagactttaggctataagaggctgactaaaagcaatccaatctcatgccaaattctattgtataaatctcgctctaaaggccgaaaaaatcagcgctcgacacggactcattgtcaccacccgtcacctaaaatctactcagcgtcggcaaaggagccatgggttctagcaactaacttacctgttgaaattcgaacacccaaacaacttgttaatatctattcgaagcgaatgcagattgaagaaaccttccgagacttgaaaagtcctgcctacggactaggcctacgccatagccgaacgagcagctcagagcgttttgatatcatgctgctaatcgccctgatgcttcaactaacatgttggcttgcgggcgttcatgctcagaaacaaggttgggacaagcacttccaggctaacacagtcagaaatcgaaacgtactctcaacagttcgcttaggcatggaagttttgcggcattctggctacacaataacaagggaagacttactcgtggctgcaaccctactagctca

SEQ ID NO: 498 - DNA, 1911 bp, Zea mays
  source (0)...(0): Zea mays BAC clone full insert sequence contig bacm.pk155.l13.fis62
ggatcgattccatagaaggggataagttttggacctaaattagtagattgggcatgttcgttgcgaaaaacgaagaaatggttccggtggcaaaaactcgtgcttgtatgcaccccgacacccgttttcggaatgggtgacgtgcggcaacgaaattgcgcgaaaccaccccaaacatgtgttttggacctaaagtagtgaattgtgagtgttcgttgcgaaaaacgaagaaatggttccgatggcaaaaacttgtacttgtatgcaccccgacacccgttttcggaataagtgacgtgcaacaacgaaattgcgcaaaaccaccctaaacatgagttttggacctaaagtagtggattgggcatgttcgttgcgaaaaacgaagaaattgatccggtggcaaaaactcgtgctttgtatgcaacccgacacccgttttcggaatgggtgacgtgcggcaacgaaattgcgcgaaaccaccccaaacatgagttttggatctaaagtagtggattgggcatgttcgttgtgaaaaacgaagaaatggttctggtggcaaaaactcatgctttgtatgcaccccgacacccattttcggaatgggtgacgtgcggcaacgaaattgcgcgaaaccaccccaaacatgtgttttggacctaaagtagtggattgggcatgttcgttgcgaaaatcgaagaaatggtttaggtggcaaaaactcgtgctttgtatgcaccgcgacacccgttttcggaatgagtgacgtgcgccaacaaaattgcgcgaaactaccccaaacatgagttttggacctaaagtagtggattgagcatgttcgttgcgagaaatgaagaaatggttccggtggcaaaaactcgtgctttgaatgcaatccaacacccattttcggaatgggtgacgtgcggcaacgaaattgcgcgaaaccaccccaaacataagttttggacataaattagtggattgggcatgttcgttgcgaaaaacgaagaaatggttccggtggtaaaaactcgtgcttgtatgcaccccgacacccattttcggaatgggtgacgtgcggcaacgaaattgcgcgaaaccaccccaaacatgagttttggacccaaagtagtggattgggcatgttcgttgcgaaaaacgaagaaattgatccagtggcaaaaactcgtgcttgtatgcaccccgacacccgttttcggaatgggtgacgtgcggcaacgaaattacgcgaaatcaccccaaacatgtgttttggacctaaagtagtggattggcatgtccgttgcgaaaaacgaagaaattgatcctgtggcaaaaactcgtgctttgtatgcaccccgacacccgttttcggaatggtttacatgtggcaacgaaattgcgcgaaaccacatcaaaacatgagttttggacctaacgtagtggattgggaatgttcgttgcgaaaaacaaagaaatggttccggtggcaaaaactcgtgcttgtatgcaccccgacacccgttttcggaatgggtgacgtgcggcaacgaaattgcgcgaaaccaccccaaacatgtgttttggacctgaagtagaggattgggcatgttcgttgcgaaaaacgaataaattgatccggtggcaaaaactcgtgcttgtatgcaccccgacacccaccccgacacccgttttcgaaacgggtgacgtgcggcaacgaaattgcgtgaaaccaccccaaacatgagttttggacctaaagtagtggattgggaatgttcgttgcgaaaaacgaagaaattgatccggtggcaaaaactcgtgctttgtatgcaccgcgacacccgttttcggaacggttgacgtgcggcaacgaaattgcgcgaaaccaccccaaacatgagttttgga

SEQ ID NO: 499 - DNA, 1311 bp, Zea mays
  source (0)...(0): Zea mays BAC clone full insert sequence contig bacm.pk155.l13.fis63
actataaataccatccttttccaaagtaaaacttgatagaaacaaatgttggatagatcgtaggacgatcaggatagacctaggacgtgaagccttaggaggatagaggggtagttaggtggctaagtgattgagccctacatgctactataagggatgggggttcttccctattccctttacgttgatgtgaggtcgttcaggacgagcatgcatgcattcttactcaaactaatggataattgggaaagaactttaatacaaactgatgaccaattaagtaccccagtaccattgttgtagttagagagaggctgagttgtgattcctttttctttttataattctttttcttttacttacgcttaaccgtacacagattctcacggatcctcggacgaagggaatgcactgtcccacactgacgggcttgcacgagagggctttccccgtattttgtgggaggtacttcagggggctggttacacgacgcctcctcagtacgcggtgcagcagttcgagaagcaccgagtgccccgctgtagggtgaggatgaccctggacctcatcccctatagccaggctggcattcgctggactctaagtcctttggataccgggctgaggatacgatcgaggcaattgcccttcacggattgaccactttctgcggattccaccccttggagctgtccactcaccccattggcttgttccccgctgagaaggaggacgacccaatgtggaaggaccgagtcgagcatgccaaggacatctgggctatctacccaggtcagacggctcacttgacagtacggtgcatgaatgccctgtaccgtctgcaagtgatgcgtggtgaggcaatgtcccatctgatggcattgttggaggcaactaagatcaccctagataacatagaggagcttgtggttgacttgtccactgagatggtggaaaaagacttacaggtggagcagctgtcaaatgagatccaagagcttgaggaactggtgggaacaagggagaacaccatcgaggttctcgaggatcaacttatcaacacccagcagcagcttgccgaggctaacgagcacctggatatgcatcaccaggagatccaggacatggaggccaatgaggacgtcgacattgagggaggagaggagcctgcctccagcttggacactgctggctcagggagaccaccttcccccgagtcgagtgttgcctcgttcgctcactaggtatcaggggtagagctagaagtcggtgatggtagaactcctcgaagctagcttagcttttgcaccc

SEQ ID NO: 500 - DNA, 2125 bp, Zea mays
  source (0)...(0): Zea mays BAC clone full insert sequence contig bacm.pk155.l13.fis64
cccaaacatgtgttttggacctaaagtagtggattcagcatgtttgttgcgaaaaacgaagaaattgatccggtggcaaaaacccgtgctttgtatgcaccccgacacccattttcggaatgagtgacgtgcggcaacgaaattgcgcgaaaccaccccaaacatgagttttggacctaaattagtggattgggcatgttcgttgcaaaaaacgaagaaatggttctgttggcaaaaactcgtgcttgtatgcaccctcacacccgttttcagaatgggtgacgtgcggcaatgaaattgcgcgaaaccaccccaaacatgagttttggacctaaagtactggattgggcatgttcattgtgaaaaacgaagaaatggttccggtggcaaaaactcgtgcttctatgcacccggacacccgttttcggaatgggtgatgtgcgacaacgaaattgcgcgaaaccaccccaaacatgtgttttggacctaaagtagtggatttgggcatgttcgttgcgaaaaacagagaaatggttccggtggcaaaaactcctgctttgtatgcaccgcgacacccgttttcggaatgagtgacgtgcgacaacgaaattgcgtgaaaccaccccaaacatgagttttggacctaaagtagtggattgggcatgttcattgcgaaaaacgaagaaatggttctagtggcaaaaactcgtgcttgtatgaacccccgacacccgttttcggaatgggtgacgtgcggcaacgaaattgcgcgaaaccaccccaaacatgagttttggacctaaagtagtggattgggcatgttcgttacgaaaaacgaagaaattgatctggtggcaaaaacttgtgctttgtatgcaccccgacacccgttttcggaatgggtgacgtgcgacaacgaaattgcgcgaaaccaccccaaacatgagttttggacttaaagtagtggattgggcatgttcgttgcgaaaaacgatgaaatggttccggtggcaaaaactcgtgcttgtatgcaccccgacacccgttttcggaatgggtgacgtgcggcaacgaaattgcgcgaaaccaccccaaacatgtgttttggacctaaagtagtggattgggcatgttcgttgcgaaaaacgaagaaatgattccggtgacaaaaactcgtgctttgtatacaccccgacacccgttttcggaatgggtgacgtgcggcaacgaaattgcgcgaaaccacaccaaacatgagttttggacctaaagtagtggattgggcatgttcgttgcgaaaaacgaagaaatggttccggtggcaagaactcatgctttgtatgcaccccgacacccgttttcggaatgggtgacgtgtggcaacgaaattgcgcgaaaccaccccaaacatgtgttttggacctaaagtagtggattgggcatgtttgttgcgaaaaacgaagaaatggttccagtggcaaaaacttgtgctttgtatgcaccgcgacacccgttttcggaatgagtgacgtgcggcaacgaaattgcgcgaaaccaccccaaacatgagttttggacctaaagtagtggattgggcatgttcgttgcgaaaaacgaagaaatggttccggtggcaaaaactcatgctttgaatgcaatccaacacccattttcggaatgggtgacgtgcggcaacgaaattgcgcgaaaccaccccaaacatgagttttggacctaaattagtggattgggcatgttcgttgcgaaaaacgaagaaatggttccggtggcaaaaactcgcgctttgtatgcaccgcgacacctgctttcagaatgggtgacgtgcggcaacgaaattgcgcgaaaccaccccaaacatgagttttggacctaaattactggattgggcatgtttgttgcgaaaaacgaagaaatggttccggtggcaaaaactcgtgctttgtagcaccccgacacccgttttcggaatgggtgatgtgcgggcacgaaattgcgcgaaaaccccccaaacatggagtttggaacttaaagttattggattgggcatgttcctttgcaaaaaacgaaaaaatggttccgggggcaaaaaactcgggctttaaag

SEQ ID NO: 501 - DNA, 1757 bp, Zea mays
  source (0)...(0): Zea mays BAC clone full insert sequence contig bacm.pk155.l13.fis65
  misc_feature (1)...(1757): n = A,T,C or G
gagccttgcgcaggtgcaacaccttgccctccttgccagggatcgcaaaacctggcggctagtgtacgtagacctcctcctttaagtcgccgttaaggaacgccgacttgacgtccatgtgatgaacgtgccagccctgctgggctgacagcgcaaggaggagtcgcacggattccatccgtgccacggaggcgaaagcatcgttgaagtcgatcccctcctgctgtagttaaccgcgtgccaccaagcgagccttgtgcttgacgatggcgccggcttcatccctcttcagtttgaacacccatttaagggtgatcgcgcgatgaccatgagggagatcagcgagctcccaggtgcggttcgtctcaaccgcgtccatctccgactgcatcgcggcccgccaagccgcatgtttctcggcctccgcgaaagaccgaggctcaccatcgtcgcatgcaagatggaactctcctgccagaatgcgagatgcagggcctggcaccgacgggtcgatgagaaggccctccacccttcgataccacaacggctcgtcgtcgtagcacgcgtcgacgcgctcctcgtcgcgggacagaggggtcacgagctccactgggtcgtgctcgacacgagctggtgtcggagaagacgtttccggagagggtaccgtcggtgctggagtacgtggtggcgaagagctcgctgtagccagagtcgtggctggagtgcgtggtggtgaagagctcgttgtagcaggagctggagagtttggcgctggagtcggtggagacttgggggctggggtagacctgctcggagaagagttgcctactcccccagctccctcaaagtggacgtactcgatggtgaagtcgtacgtcggagtcgtgccgtcgtccaccgccttgtcccacgcccatcctcgcccttcgtcgaacactacgtcgcgcgccgtgcgcacacgctgtgttcttgggtcaaggatgcggtaggccttcgagccctccgcgtagccaatgaacatccccggggtgctcctatcgtcgagcttgctgatgtggccaagctccttggtgaacgtgaggcagccgaagacccgtaggtgagagaccgccggcttgcgcccatgccaagcctcgtacggtgtcatcccgttgagagccttggtgggcgagcggttgaggatgtaaaccgctgtcaccaccgcctctccccagaagacagctggcattcctctctgcttgaggagagcccgagccatccccacaaccgtctggttgcgccgctcgacgacgccgttctgctgcgggctgtacggcgcggagtagtggcgctgaacgccctcatccgcgcagtacgacgcgaactcagccgccatgaattcgccgccgttgtcggtgcgcagcgcgcgcagcttgcggccgcgctccgcctccgcagcgacctgcacacgcctgatggcgttcgcagcctctcccttgctgccaaggatcatcacccacatgtagcgggagagatcgtcgacgagcagcaagaagtagcgtcgtcctcctgggtgtggctggtgtcaccgggccacacaagtccccatgcacgagctcgagcctctccttggctcggaagctcgactgctgggggaaaggggagtcgtctctactttgttcacacgcagacatcgcagaattgctccacagggtcaagcacggcaggcctcgtaccatctccttggcactgagccgctccaaagctcanagttaaag

SEQ ID NO: 502 - DNA, 1773 bp, Zea mays
  source (0)...(0): Zea mays BAC clone full insert sequence contig bacm.pk155.l13.fis66
aaaaaaacacaatgcgaccagcaacaaatgacgcgaaagcacacaaattcaacaatgcagattattgaaagaaggtgcgaggctcaaaagggtgctggtatacggtctaacctgaatttttatgtggttttgtggactgtaggagaaaaaaacacttgataaactcaccgatcaacctggaaatctgataccaattgatatagctgaggtgcccgatctttcggcgagtagagataattccgatttggcggaagatgacccttgcgatccgactacgacgagcaagcccgaggcgccaatgcaaatgctgaaccaactccctgtggttaccgaccttgctgatgcgagatcggcctgatcacgaagatcgtttcctgtgcgcaatcgaagaacgaacaaaaaaatgatgcgagcaatctaatctattactcgagggtggagttctgaatacacgaagacagcgcagatttgcgcgtgttcgagagtagctaaaggtaacgtaaaacaaaactcgaaaacaaaggaggcgcagctcctggataaatagagaggggcgcagcccctaggggcggccaaccctaggtcgtccactatgggccgcagttgggctggttgtctattcttctgggccctcattcttcagtagcatgacgaagttaagatctctggcacgggcccgagtgattggcccagctaatgaaggaagtggcgcttgatgtggaggtgctgctggtgtagtcgtactcatagtgatgtccaaatcagaacatgcccaatccactactttaggtccaaaactcatgttcggggtggtttcgcgcaatttcgttgccgcacgtcacccattccgaaaacgggtgtcgcagtgcatataaagcacgagtttttgcaaccggaaccatttcttcgttttttgcaacgaacatgcctaatccactactttaggtccaaaacacatgtttggggtggtttcgcgcaatttcgttgccgcacgtcacccattccgaaaatgggtgtcggggtgcatacaaagcatgagtttttgccaccagaaccatttcttcgtttttcacaacgaacatgcccaatccactactttagatccaaaactcatgtttggggtggtttcgcgcaatttcgttgccgcacgtcacccattccgaaaacgggtgtcgggttgcatacaaagcacaagtttttgccaccggatcaatttcttcgtttttcgcaacgaacatgcccaatccactactttaggtccaaaactcatgtttagggtggtttcgcgcaatttcgttgttgcacgtcacttattccgaaaacgggtgtcggggtgcatacaagcacaagtttttgccaccggaaccatttcttcgtttttcgcaacgaacactcacaattcactactttaggtccaaaacacatgtttggggtggtttcgcgcaatttcgttgtcgcacgtcacccattccgaaaacgggtgtcggggtgcatacaagcacgagtttttgccaccggaaccatttcttcgtttttcgcaacgaacatgcccaatctactaatttaggtccaaaacttatgttttgggtggtttcgtgcaatttcgttgtcgcacgtcacccattccgaaaacgggtgttggattgcattcaaagcacgaatttttgccaccggaaccatttcttcgtttttcgcaacgaacatgcccaatccactactttagttccaaaactcatgtttggtgtggtttcgcgcaattttgttgtcgcacga

SEQ ID NO: 503 - DNA, 2144 bp, Zea mays
  source (0)...(0): Zea mays BAC clone full insert sequence contig bacm.pk155.l13.fis67
ctcacgtcacccattccgaaaacgggtgtcggggtgcatacaagcacgagtttttgccaccggaaccatttcttcgtttttcgcaacgaacatgcccaatccactaatttaggtccaaaactcatgtttggggtgtttcgggcaatttcgttgccgcacgccacccattccgaaaacgggtgtcgggttgcattcaaagcacgagtttttgccactggatccatttcttcgtttttcgcaacgaacatgcccaatccactactttagttccaaaactcatgtttggggtggttttgcgcaatttagttgccacacgtcacccattccgaaaatgggtgttggggtgcatacaaagcacgggtgtcggggtgcatacaagcacgagtttttgccaccggaaccatttcttcgtttttcgcaacgaacatgcccaatccactactttaagtccaaaactcatgtttggggtggtttcgcgcaatttcgttgccacacgtcacccattccgaaaacgggtgtcggggtgcatacaagcacgagtttttgccaccggaaccatttctttgtttttcgcaacgaacatgcccaatccactactttaggtccaaaactaatgtttggggtggtttcgcgcaatttcgttgccgcacgtcacccattccaaaaacggatgtcggggtgcatacaagcacgagtttttgccaccgaaaccatttcctcgtttttcgcaacgaacatgcttaatcctctactttaggtccaaaacacatgtttggggtggtttcgcgcaatttcattgccgcatgtcacccattccgaaaacgggtgtcggggtgcatacaaagcacgagtttttgccaccgaaaccatttcttcgtttttcgcaacgaacatgcccaatccaatactttaggtccaaaactcatgtttggggtggtttcgcgcaatttcgttgtcgcacgtcacctattccgaaaacgggtgtcggggtgcatacaagcacgagtttttgccaccggaaccattttttcgtttttcgcaacgaacattcccaatccactactttaggtccaaaacacatgtttggggtggtttcgcgcaatttcattgtcccacgtcacccattccgaaaacgggtgtcggggtgcatacaagcacgagtttttgccaccggaaccattttttcttttttcgcaacgaacattcccaatccactactttaggtccaaaacacatgtttggggtggtttcgcgcaatttcgttgccccacgtcacccattccgaaaacgggtgtcggggtgcatacaagcacgagtttttgccaccggaaccatttcttcgtttttcggaacgaacatgcccaatcctctactttaggtccaaaactcatgtttcgggtggtttcgcgcaattcgttgccgcacatcactcattccgaaaacgggtgtcggggtgcatacaaagcaagagtttttgccaccggatcaatttcttcgtttttcgcaacgaacatcctgaatccactactttaggtccaaaacacatgtttggggtggtttcgcgcaatttcgttgccgcacgtcacccattccgaaaacgggtgtcgggggtgcatacaagcacgagtttttgccaccggaaccacttcttcgtttttcgcaatgaacatgctcaatccactacattaggtccaaaacacatgtttggggtggtttcgcgcaattttgttgtcgtacgtcactcattccgaaaacgggtgtcgcagtgcatagaaagcacgagtttctgccaccggaaccatttcttcgtttttcgcaacgaacatgcccaatccactactttaggtccaaaactcatgtttggggtggtttcgcgcaatttcgttgctgcacgtcacccattccgaaaacgggtgtcgggggtgcatacaagcacgagtttttgccaccggaaccatttcttcgtttttcgcaacgaacatgctcaatccacttctttaggtccaaaactcatgtttggggtggtttcgcgcaatttcgttgccatacgtcactcattccgaaaacgggtgtcgcagtcatccatctagggaacgatcctcgcccgcgatggggacgtcccactccccgaatgagtgttcggc

SEQ ID NO: 504 - DNA, 1711 bp, Zea mays
  source (0)...(0): Zea mays BAC clone full insert sequence contig bacm.pk155.l13.fis68
  misc_feature (1)...(1711): n = A,T,C or G
agtctgacactatcttcttcagcataccatgaagacaaacgatccgagacatatacaactctgccaatactgcactgctgtagttggtcttgactggtatgaagtgggctgacttggtcaaacggtccactactacccaaatggaatcatagccggctcgagtgcgaggcaatccgactatgaagtccataccgatttcatcccatttccactgaggaatttgcaacggttgcaacaatccagcaggtctctggtgctctgctttgatccgtcgacaactatcacacatagccacatgctctgcgatttccctcttcattccgtaccaccagaatttcttcttcagatcctgatacatcttctcactgccagggtgaatcgaataggctgtctcatgggcttccttgaggatcaactcccgaatggattggacattgggaacacacaagcggtctttaaaccatatcacaccttctgcatcttcccgaaaatctttgcctctgccatctagaatcagtcgccggatctcactgatcttctcatcattcttctgcgcttttttgatttcccgctccagggtaggttccaactcaacggtgactcctcgcgaattgtttagaaatccgagactcaacttgtcaaactccttggccaactcataaggcatcggacgagcgaccatcagattgatctgactcttcctgctcaaagcatctgccactacgttcgctttgcctggatggtaatggatctccaactcatagtctttgatcagctctaaccatcttcgttgcctcatattcagctctgactgagtgaatatgtacttcagactcttgtggtctgtgtaaacatcgcatttctgtccatacagatagtgcctccatgtcttcagtgcgtgaaccactgctgccaactctagatcatggattgggtaattcttctcatgaaccttcagttgtcgggacgagtaagccacaactcttccctcttgcatcaacacgcatcccaaaccagtgtaacaagcatcataatacaccgagaagggcttgtgcacatcaggcaagactaggacaggcgctgttgtcaacttctctttcagcgcttcgaaggcctcttgacatttctgggtccacttgaactcaaccttgttgcctagtaacgctgtcattggtttcgcaatcttcgaaaacccttcaatgaatcgccgataatatccggtcattccaatgaaactcttgattcctcgagcatctgttggcgctttccagttcagaatgtctgccactttcttcggatccacagccaatccttctttgttgattatgtgacccaagaacagaacttcattgatccagaattcacatttgctcaactttgcatacaactggtgctctcgcaatctctgcaataccatcctcaaatgatctgcatgttcttcttcgctttgagaatagatcagaatgtcatcaatgaataccaccacaaacttgtcaagataatccatgaatacactgttcatcaagttcatgaagaaggccggtgcattggtcaaaccaaaagacatcacagtgaactcatacaaaccatacttggtaatgaatgccgtcttcggaatgtccgaaggtcgaatcctgagctgatgataccntgacctcagatctatcttgnagaacacactggctccttctcactggtcgaacagatctta

SEQ ID NO: 505 - DNA, 1896 bp, Zea mays
  source (0)...(0): Zea mays BAC clone full insert sequence contig bacm.pk155.l13.fis69
attgcgcgaaaccaccccaaacatgtgttttggacctgaagtagaggattgggcatgttcgttgcgaaaaacgaataaattgatccggtggcaaaaactcgtgcttgtatgcaccccgacacccaccccgacacccgttttcgaaacgggtgacgtgcggcaacgaaattgcgtgaaaccaccccaaacatgagttttggacctaaagtagtggattgggaatgttcgttgcgaaaaacgaagaaattgatccggtggcaaaaactcgtgctttgtatgcaccgcgacacccgttttcggaacggttgacgtgcggcaacgaaattgcgcgaaaccaccccaaacatgagttttggaccaaaattagtggattgggcatattcgttgcgtaaaacgaagaaattgatccggtggcaaaaactcgttctttctatgcaccccgacacccgttttcggaatgggtgacgtgcggcaacgaaattgcgcgaaaccacaccaaacatgagttttggacctaaagtagtggattgggcatgttcgttgtgaaaaacgaagaaacggttccggtggcaaaaactcgtgctttgtatgcaccgcgacacccgttttcggaatgagtgacgtgcggcaacgaaattgcgtgaaaccaccccaagcatgagttttggacctaaagtagtggattgggcatgttcgttgcgaaaaacgaagaaatggttccggtggcaaaaactcatgctttgaagcaacccaacacccattttcggaatgggtgacgtgctgcaacgaaattacgcgaaaccaccccaaacatgagttttggacctaaattagtggattaggcatgttcgttgcgaaaaacgaagaaatggttccggtggcaaaaactcgtgatttgtatgcaccccgacaccctttttcggaatgggtgacgtgcggcaacgaaattgcccgaaaccaccccaaacatgagttttggacctaaattagtggattgggcatgttcgttgcgaaaaacgaagaattggttccggtggaaaaaactcgtgctttgtatgcactgcgacacccgttttcggaatgagtgacgtgcggcaacgaaattgcgcgaaaccaccccaaacatgagttttggacctaaagtagtggattgggcatgtttgttgcgaaaaaggaagaaatggttccggtggcaaaaactcgtgctttgaatgcaaacaaatacccattttcggaatgggtgacgtgcagcaacgaaattgcgcgaaaccaccccaaacatgagttttggacctaaattagtggattgggcatgttcgttgcgaaaaacgaagaaatttccagtggcaaaaactcgtgctttgtatgcaccccgacacccgttttcagaattggtgacgtgcggcaacgaaattgcgcgaaaccaccccaaacatgtgttttggacctaaattaatggattgggaatgttcgttgcgaaaaacgaagaaatttccagtggcaaaaactcgtgctttgtatgcaccccgacacctgttttcagaattggtgacgtgcggcaacgaaattgcgcgaaaccaccccaaacatgtgttttggacctaaagtagtgtattgagcatgttcgttgcgaaaaacgaagaaattgatccggtggcaaaaacttgtgctttgtaagcaccccaacacccgttttcggaatgggtgacgtgcgctaacgaaattgcgcgaaaccaccccaaacatgagttttggacctaaagtagtggattgggaatgtttgttgtgaaaaacgaacaaatggttccggtggcaaaaactcgtgcttgtatgcaccccgacacccgttttcggaatgggtgacgtgcggcaacgaaattagtggattgggtatgt

SEQ ID NO: 506 - DNA, 1781 bp, Zea mays
  source (0)...(0): Zea mays BAC clone full insert sequence contig bacm.pk155.l13.fis70
ggcgcgtatacgactcctatggggagtgggtcctaccacacgggcgggcgaggatcgttaccttgattgaggtcctctttgagcagttgaggggtgccgaggtgttctccaaaattgatttgaactctggttatcatcaattgaggattcgtgaggaggatattaagaagactgccttctgcaccaggtatgggcattatgagttcatagtcatgtcctttggcttaactaatgcccctgctgcgtttatggaagcaatgaataggatgctgcatgaattcttggacgattttgtggtcgtattcctagatgatattttgatttattcaaagaccgaggccgagcatgatcagcatctccgtctcgttctgggtgccctaaggaagaatcaattctatggcaagttgaagaagtgtgccttttggctatctgaagtggctttcctggggcacgtgcagcagggtattgcggttgaccccaagaatgttgcggctgtagtggagtggaagagaccttctagtgtctctgaaatccgaagtttcttggggcttgctgggtattatcggcgtttcgtaccaaatttttccagcattgctaagcctttgactaggctcttggggaaggatgttcccttcgtctggtccggcgattgtgagatcagttatcagtcattgaagagcaagttggtggacgcccctatcctagctttgcctgagagcagtaagcgtttcatagtttatacggatgcttcgcgtattggtcttggctgtgtgctaatgcaggaaggcagggtgattgcttatggctcaaggaagttgaggaagcatgaggggaattatccaactcatgatctggaattggctgcggtggtttttgctctaaagtcgtggaggcattacctttatggtgaggcttgtgacattttcactgatcacaaaagtctcaagtatatttttactcagaaggagctgaatttgaggcagcgtcggtggctagaattgattaaagattatgatttgtccattcattatcacccggggaaggctaatgtggtggcggatgcccttagcaggtccggggttccaaaggtggccttgccgttggtcgctgatctggaccgtttggggatcgctttgtgttatgtcggcaccgctagcaaggagactcagatgcttattcaatcctctcttatagagagagtgcgtgcggctcagcagcaggatcgtcttttgcaggaagcccgaaggagggttggtgatggtaaaccgcgggagttcaccattgatgagaatgatttggttcgtttcaggggccgtctttgtgtgcctcagaaaccagaggtgaagctggatatcctgcgagaagctcataaaacgccttacaccgtccatcctggcaaaaccaaaatgtaccgagatttgaagcaaaacttctggtggaagcggatgaaggttgacatttctaagtatgtggccgcctgtgaagtatgtcagcgcgtgaaggccgaacataagcggcctgcaggtttgctgaagccattggaaattccagagtggaaatgggagcatatcaccatggattttgtggtgggtctacctcgttcccctcgtggcagggatgctatttgggtggtagtggatcgcttgactaagtctgcacattttattcccatgaagaccacgaattcagcttcagatttggttcccttgtatatgaaggaagtagtcaggcttcacgggcttctaaggaaaagataccgtcgcctccacatggtattagaa

SEQ ID NO: 507 - DNA, 3394 bp, Zea mays
  source (0)...(0): Zea mays BAC clone full insert sequence contig bacm.pk155.l13.fis71
  misc_feature (1)...(3394): n = A,T,C or G
aaagataatttctctaccaacgctgtacttgccaaattgttgcagctgccactatcgatgatgatgcgaatcgaccgttcgtgcacgacgcccttggtatggaatagagtgtgtcgctgatttttttcggcctgggcaacctgtgtgctgagaacatgctgcacaacaagactctcatacctatcggcgtcgatgggatcaacgtggacttcctcattttctgcatggttagtggcaatcatagcatgactagtttcctcagaatcactggctgaagagtactcaccattgtcacgtataagcaaggtacgcttgtttgggcagtcccgaatcatgtgcccaaaccctctgcaacgatggcactgaatatcccgtgtacgtcctgtggaagaagcggcgcctttggcagggggtgccactggcttggccggccctgtgcgcgatgtagtgctaggcgtaggaggtgcagggctggaaggagttgagctgtgtgttggtccccggcctgcaaaagagttagtatatgtctttgatcgtcgtccctgcacttcacgttcagctttgcaagcatattcaaacaatgtggttatatcaaaataatccttataatcaagtatatcctgaatttccctgttcaaaccaccacgaaaacgcgccatagcagcgtcatctgactcaaccaaaccacaacgaagcatacccttttgcaactcctggtaatattcctcaacagattgtgaaccttgttgaaaacgctgcattttgttaagcaaatcacgagcataataggaaggaacaaatctgtggcgcatggcagtttttaattgggtccaagtaatgacactgttaatgggaagtttttgtttatactcacgccaccaaattaaagcaaaatcagtaaattcactaatggcagccttcacttggctattagcaggaatatcatggcatgaaaatttctgttctacctctaattcccaatcaagatatgcagcaggatcatatttaccattaaaagatggaattttaaatttaatcttagaaaataagtcattagggggatgacgaaccacacgacgtgcacgaccacggcgatctccatcgtcctgctcagtgtcaccgccgtattcctgctccatctttgtggtcaatgcatcaaggcgtgcaaggatggtgtcgagtgtggtgcgagtcgccgttttgagncaggtcaagttggttgaaacgctcggtcgtcgaagtgatcgttgaaatcaagccgttcatgcatcgtcctaatgtcagcagcaagtccatcaacttgtccccttacttcctgcaactgggcgtccaccatgtcgtgtgctcctgccatagttagcgcaaacaccaaaagaagaaaaaccaacgacaaaaacaggggtgtactgctcacaaggcgctcacactagtgctgttatcaagttcttatccgttcttaccaagccacagtggtgaactgcaatcaacaggtggaaccggtgaaagattggatgagcgattgcgtggagaaacagaaacctgctcgtcgtagaaatatgtggagttgtgggtaggctgcactcaagtcaaggattagcacgatcaaacaataatgcaaagttgaattatagtgcaaaacacgaaactatattgctggccacaggtgcaaaagatggatggaactagcagaatggcagtaccgtaaatattgtactagtgatgccaaaaaggcactagtagaaatcacaggtgattttgtttttcttttttgtatgatttttttgatatttttctcagcacaagaagcaacaagataggagctagacgaagtttcacctaaaacagagatcagatgtggtctacagaaaatcaggaagttctctgaaaagcgtgcgagaactttgacggatttttttctttattttcctgaatttttttgacaattttgtcgaacccaaacagaccgaaggtgagtttggccgggctcagaatggtgtcaacaagctcctgtaaaaatttcagattttttggacacccgagcgaaaagttatgcccgttttacggaaggtacctcaagttatgttctaaaaacgaccggaatgaagcaactgtatcctttctccttcgttatctttttttttctgttttttttttacgtaaccgaaggagaaaaacaaggaagcggccgttgactcggtatgtttttttttctgttttttttttcgtaaccgaaggagaaaatcaaggaaacggccgttgactcggtttgttttttctgtttttttttttttgacgtaaccgaaggagaaaaataaggaaacgatgttgactcggtttgtggtgtgatcaaacgggagatggtggcggcgctagggtttgaatggtggaagaacacaatgcaaccagcaacaaatgacgcgaaagcacacaaattcaacaatgcagattattgaaagaaagtgcgaggctcaaaagggtgctgggataagatctaacctgaatttttatgtggttttgtagactgtaggaaaaaaaacgctcgataaactcaccgatcaacctggaaatctgataccaattgatgaagctgaggtgcccgatctttcggcgagtagagataattccgatttgtcggaagatgacccttgcgatccgactacgacgagcaagcccgaggcgccaatgcaatcgctgaaccaactccctgtggttaccgaccttgctgatgcgagatcggcctgatcacgaagatcgtttcctgtgcgcaatcgaagaacgaacaagaacaagatgcgagcaatctaatctattactcgagggtggagttctgaatacacgaagacagcgcagatttgcgcgtgttcgagagtagctaaggctaacgtaaaacaaaactcaggaaataaaggaggcgcagctcctgaataaatagagagggggcgcagcccctaggggcggccaaccctaggtcgtccattatgggccgcaattgggctggtcgtctattcttccgggccttcgttctttaacaacatgatgtagttcaattctcttgcacggggcccgagtcactggcccaggtggaaggggtggcgcctgggctggagaaggtgctgctggtgtagatgtgctcgtgttggtgttgatgtccgcatcagacgcagctcgtgtaaaattacattagtgccctttacatttatcaataactctacagtaattcttcagggtctaatttggcttttcatcttttaagtcggttccccttttctactgtcatgccgaagcttatctacgcatagcttcgtgatgatcttttccttcgtcacaatcgccttccgtcccactcaagcttcgtcttgaccatactcttatatactcgtaatccaattccgaa

SEQ ID NO: 508 - DNA, 2464 bp, Zea mays
  source (0)...(0): Zea mays BAC clone full insert sequence contig bacm.pk155.l13.fis72
aggcaagtgttgaatgatgcctccaatataacattcggttgggtcaaaaatgtccatatcacctgccatgtttagtaaagacaagaaacaataaaaaatatctttgattctataaactactaggaatcattgttgtaatctcccactctcaaactggttaaacaagttcttacaagttctcaccatgcaaagcaggaggcgctggcaaacagcatgaacaacaacaacagtggctgctagcacaacctggtggtgttgtagaaaattttgtggatttataggtggctgttcaaacaatagttccaaggaatagctagtaccacgttagccacaacaagttgaataaacgttccacaatggtgttgtgctggtcctagtccaaaccgtaatagagacgcgagccgttacacaaatagtatcaccaaaagctcagaacaacaatctgatttctgaaactataaaaagaaggcacacaaactgccttttgttttgttgcacttacaaattttatctaccaaaattcagaactggtttttttttctctcttttgttttgcacgtgtcttttttttgttttgctgattagtgcggctttttttgtgcactcgccttttgctttctcttctttttggttgaattgcagcaagaggtctaaactggtgattgaaacaaggtggcgcgaactcgaaactctagcggtaagaaaactttagaccagcaactcgacccaaatgcagcaaccgtgaattcaacaagtcgaaaactaagtagtaaagcaaaggctcaaactgtttttaggtgaatttctgctctaaatatatctttgggcaaaagtggactgtaggtaaacaaaacaaggaagattgagatctctcaccgagcaacctgaaatttgataccacttgataaacccaacgggtagaagggcgcccgatctttcgatgagagatgatggaggtggaaaacttgttggagaacgacgttggctgcccgactaccacaaccaagatggtgtggcgccttgagcgacaggtacaccgtctcctgataactacgatttggggtggaggtcgacgttgtgctatccgactacaacaaccacaagggtgctgcgccttagcgatagttacaccggctcctgttgttgctgctcttgccgtgccaagaacagccttgaacctgcaagcaatcgagaacaagcaagaacaagataaaacgcagacgctcacagatctgatagatttggggttctgtttcaagtatccgggtggtctagccgacacacgcgtttataaggaagtagcaaaggctaaacttacatcaaacaaaaacccaagttctttggtggctgctagttgcttaaatagaggaataggaaggagttctaatggagaacgaaactctctcggcagtttctggacgcctcgtttggtttctgtctttgattcttgatgcacatgaaagtagacgaagagagctttccaacaagtagttatttgcactaaacaaccttgggagtggaaagttatgctccatttaatttggtgcatgctgcagttacgaaattgacttgggtagagcaggagttcactcggcagtttctggacacttagtctctgatctctcgttgattcttgatccactagaaagtagacaaagagacctttccaacaagtgcttatttgcattaaacaaccttgggagctgaaagatatgccctcttaaacttgcacttgttgtagtttcgaaatcccctcaagtggagcagcttttattgccttgttgccttctcaaattctagatggttcacctcccaaacaccttagaataataaagtaatcacaaggtattagtacctcatttaaggaatgattagcttcaacaacaaggaacgagttcacctgataattaaatttacgtgcacggactcgtttcagtggtccattattaaatggtgaaggaggtcgctggtgtggtgtattgatggcagtgatgtcctcatcagttccggtggcaaaaactcgtgcttgtatgcaccccgacacccgttttcggaatgggtgacgtgggacaacgaaattgcgcgaaaccaccccaaacatgtgttttggacctaaagtagtggattgagaatgttcgttgcgaaaaacgaaaaaatggttccggtggcaaaaactcgtgcttgtatgcaccccgacacccgttttcggaatgggtgacgtgggacaacgaaattgcgcgaaaccaccccaaacatgtgttttggacctaaagtagtggattgggaatgttcgttgcgaaaaacgaaaaaatggttccggtggcaaaaactcgtgcttgtatgcaccccgacaccctttttcggaataggtgacgtgcgacaacgaaattgcgcgaaaccaccccaaacatgagttttggacctaaagtattggattgggcatgttcgttgcgaaaaacgaaga

SEQ ID NO: 509 - DNA, 2381 bp, Zea mays
  source (0)...(0): Zea mays BAC clone full insert sequence contig bacm.pk155.l13.fis73
  misc_feature (1)...(2381): n = A,T,C or G
gctttgactgataatagatggccagatgggggtccgatatctctggaagtctgccggagctgttctaattgagtacctcagggtatgggacttgattcagggagttcatcttcatccgggggctcctgataggcacagatggcttcccacatcctctggggaatactccgccaaatctgcatataaacggtttctagctgggtcaactttgtttgaaccagctgagaggatttggaaaaggtggtctcctccgcgttgcaaattctttgtttggttggcctctcttgatagatgctgaactgctgacagactagctcgtctgggcctcgatcacccggaaagttgccctctttgcgatcaacacgaagaaacagtccaacacattttggtctcctgtgtttttgctagggatatttggtttcaagtcctaagcaaggtggggttgcagtccctttcccctagggctgccgttcttgttttccaggaatggtggaggaaggctaaaagcagggtgccaaagctccagaaaaaagggttcaactcaatagtgatccttgtggcctggtggttgtggaaacatagaaatgcatatgttcgatggtgcctctccaaacagcaacattgtcctacaacatatccatcaggatgctcatatgtggggaatgcccgggggctggggcagcagacattaggaggctatgtacttagcactgggactctgggagtgcttgtttgctgctggcttgtagtagtgtggtttcctcatggatagttatgtgtgtgcctgttcttggccgccgtaaggaggccttttttgtactgttttggccatctaaagcatctttctcttcttaatataatgatgtgcaatttgtaagtagagggactctaactctcatcaagaggatgacactatgagttggggcaattttctgtttatttcctcaaacactacacaatgccatacccatctaagggttggagacccatatttatagccctagaggctgcactaccacaccttctcacacacactacacaacaggattgtcctatagatgctaaagagactacagaggacaatcaaaagcgactgttgtcctctagatgctaaagggactacagaggacagtcaagctgtcctctagatgctaaaggactacagaggacagtcaaaagcgactgctgtcctctagatgctcaaggactacataggacagtcaaaagcgattgttgtcctctagatgctcaagacttattccatcattctccccctaagtcttgggcgtcgtcttgtgagaaagttgggccatcccggacctggagcaaagctcaacaaacttgatcttcccaaggggcttggtgagcaggtctgcaagctgatccttggtgttgatgtagcgcgccttgatgctcccttctgccaagcagtctcggatgaaatggtatctcagccggatgtgcttgctccgttcatggaacacggggttcttggccaatgccagagcggactggctgtccaccctgagttccaccgctccagtgtctctcccgaggagatcaccgagcagtcgagccagccagagcgcctgagtcgaagcagtggacgccgctatgtactcggcctcgcagctggacatggccaccacctgctgcttcaccgactgccagctaatgaggcacttgtcgaggaagaagaggatcccgcttgtgctcttgctagtgtcgatgtcaccggcgtggtcgctgtcgctgtacccgacaaggtgtgcctccccagggcacctcgggtagtagagaccgtggtcgagagtccccgcaacatagcggatgatcctcttcacagcctgctcatgctccgtcgtcggtcgctgcaagaaccgactaacgtagccgacggagtatgccaagtcaggccgtgtgtggacgaggtagcgaacgctccccacaagacgctggtactgtgtagcatccacctcctccgtcgtgctgtcgcgactcagcttcagcctctcctccaggaggagagctgggttgcagtcggtgagcccagccagctcaacaatgcgcttggcgtaggcggtctggcgaagtgtgatcccggagtctccctggtgcacctcaatccccaggtagaaggagagatgccccaggtcactcatttggaaagtggccttcatctcttccttgaacgctgccacctctacatccttggcgccggtgatcaccnagtcgtcgacgtagacacccaccagcagggcacttccctcatttgcccgncgatagatggctgcctcgtgcgggctggcgtgaaaccattcctttgagcgtggatccagctggcatttcacgcccntcgtgcctgtccaggccatanagac

SEQ ID NO: 510 - DNA, 3329 bp, Zea mays
  source (0)...(0): Zea mays BAC clone full insert sequence contig bacm.pk155.l13.fis74
ttaatgatggtggtaaaataaaggaacacgttcggtacgtgtccccttctcgctgggttcttattctgattatgctgattgcgatgttattcctatggaagcatgctctttgttattaggtcgaccttggcaatatgatactgatagtttacatcatggtcgttcaaatcattattctttcatgtttaaaggccagaaaataattatacatccaatgacccctgaccaaattttgaaagatgatcttactagggctgctaaaactgcacaacaagtcaaatcgacatcagccgcacctattaaatctgaaatcaagttgcactctcctgttttacttgctacacgtgctgattttgatgatctccatgaagctcatatgccctgttatgcacttgtatgctcgcgaatgcttgttccgcttgatgatgcaccgtctttggatataccccctgctgttgttaaccttttgcaggagtatgctgatgtttatcctacggacttaccaccgggtcttcctcccctccgtggcattgagcatcagatcgatctcatccccggcgcttctcttccgaaccgcgccccgtaccgtacaaatccagatgagacgaaggagatccagcgccaggtgcagacgctgcttgataagggttacattcgtgagtctcttagcccttgctcggttcctgttttactcgttccaaagaaagatgggtcatggcgtatgtgcgtagattgtcgtgctattaataacatcacagttcgttatcgatatcctattccacgccttgatgatatgctagatgagcttagtggtgccgttattttctctaaggttgatttgcgtagcggttaccatcagattagaatgaaactcggtgatgaatggaaaacggcttttaaaacgaaatttggtttatatgaatggttggttatgccatttggattgactaatgctcccagcacctttatgcgtttaatgaacgaagttctacgggccttcataggtttgtttgttgttgtttatttcgatgatatccttatttacagcaagtctatagaggagcatttagaacatttgcgtgctgtttttgacgctttgcgtgctgctcgcttgtttggtaacatggaaaagtgcacattttgcacgcaacgtgtctcgtttcttggttatgtggttactccgcagggcattgaggtggatagcagcaagattgctgccattcgggagtggcctacaccgacgacggtcacacaaattcggagctttcttggacttgccggtttctaccgcagatttgttcgtgattttagctccattgcagcgcctctacatgagcttacaaagaaagatgtgccgtttgcttggagtgattcgcaggaggtagcgttcagcactttgaaagataagttaacccaagctcccctattgcaattgcctgattttaataaagtgtttgagcttgaatgcgatgctagcggtattgggctaggtgctgttttgttacaagaaggaaaaccagttgcttattttagtgaaaaaataagcggtgctagtctgaaatattctacttatgataaggagctttacgctttagtgcgcactttgcatacatggcagcactatctttggcatcgtgagtttataatccattctgatcatgaggctttaaaacatattcgtacccaaacaaatctgaaccgtcgtcatgctaaatgggtagaattcattgagtcctttccttacattattaaacacaagaacgggaaggacaatgttattgctgatgctttgtctcgtcgctataccatgctgtcacagttagattttaaaatctttggtttggacactgtgaaggatcaatatgttgacgatgctgattttaaagatgctttcggccattgtattaatgggaaaccatggggcaaatttcacatacaggatgggttcctgtttcgcgctaacaagctgtgtgttccagctagctcggttcgtcttttgttgttacaggaagcgcatggaggcggtctcatggggcattttggcgtctacaagacacatgaggtgttggctgcccacttcttttggcctcggatgcgcgctgatgtggagcgcctttgtgcacgctgcactacttgtcagaaagctaagtcacggttgaacaaccatggtttgtatatgcctttgcctgtcccttcttctccttggcttgatatctctatggactttgttttgggcttgcctagaactaagaaggggagggatagtatttttgtggttgttgatagattctctaaaatggctcactttataccttgtcataaaactgatgatgctagcattgttgctgaattgttatttagagaaattattcgtttacatggtattccaaaaacaatagtctctgatcgcgatgctaagtttctaagccatttttggagatctctttggaataaattgggaactaaattgttgtttagcactacttgtcaccctcagattgatggacaaactgaggtagtaaatagaactttatctaccatgcttagggctgttttagacaagaatttgagacgttgggaggattgcttgcctcatgttgaatttgcttacaatcatgccacgcattcttctacaaagatgtgccctttccagattgtttatggttacattcctagggcacctattgatttgatttcacttaatgctgcgaacgccccacatgtagatgcttctgcacatgttgaacaaatgattaccatacatgaacaaacgaaacagaacattgctgctactaatgcaaaaaatcaggttgctggtagtaaaggaagaaaacatgttacttttgaacctggtgatatggtttggttgcatttgagaaaggatcgttttcctactttgcgccgttctaaattgatgcctcgtgctgctggtccttttaagatactaaccaagattaatgataatgcttataccctcgacctacctgcggattttggtgtttccactagttttaatgttgcagatttgaaaccgtatgcgggagaagatgaggagttgccgtcgaggacgacttcagttcaagaaggggaggatgatgcggacatcaacaccaacacgagcacatctacaccagcagcaccttctctagcccaggcgccaccccttccacctgggccagtgactcgggcccgtgcaagagaattgaactacatcatgttgttaaagaacgaaggcccggaagaatagacgaccagcccaattgcggcccataatggacgacctagggttggccgcccctaggggctgcgtcccctctctatttattcag

SEQ ID NO: 511 - DNA, 3341 bp, Zea mays
  source (0)...(0): Zea mays BAC clone full insert sequence contig bacm.pk155.l13.fis75
  misc_feature (1)...(3341): n = A,T,C or G
cagcgacacccgtttttggaatgagtgacgtgcggcaacgaaattgcgcgaaaccaccccaaacattagttttgtacctaaagtagtggattgggcatgttcgttgtgaaaaacaaagaaatggttccggtggcaaaaactcgttcttgtatgcaccccgacacccgttttcggaatgggtgacgtgcggcaacgaaattgcgcgaaaccactccaaacatgtgttttggacctaaagtagtggattgtgagtgttcgttgcgaaaaacgaagaaatggttccggtggcaaaaactcgttcttgtatgcacccgttttcggaatgggtgacgtgcggcaacgaaattgcgcgaaaccaccccaaacatgtgttttggacctaaagtagtggattgggcatgtttgttgcgaaaaacgaagaaatggttccggtggcaaaaactcttgctttgtatgcaacccgacacccgttttcggaatgagtgacgtgcggcaacgaaattgcgcgaaaccaccccaaacatgtgttttggacttaaagtagtggattgggcatgttcgttgcgaaaaacgaagaaatggttccggtggcaaaaacttgtgctttgtatgcaccgcgacacccgttttcggaatgggtgacgtgcgacaacgaaattgcgcgaaaccaccccaaacatgagttttagacctaaagtagtggattgagaatgttcgttgcgaaaaacgaagaaatggttccggtggcaaaaactcgtgctttgtatgcaccgcgacacccgttttcggaatgggtgacgtgcgacaacgaaattgcgcgaaaccaccccaaacatgagttttggacctaaattactggattgggcatattcgttgcgaaaaacgaagaaatggttccggtggcaaaaactcgtgctttgtatgcaccctgacaccctttttcggaaagggtgacgtgcggcaacgaaattgcgcgaaaccgacatgagttttggacctaaagtagtggattgggcatgttcgttgcgaaaaacgaagaaatggttctggtggcaaaaactcgtgcttgtatgcaccccgacacccgttttcggaatgggtgacgtgcgacaacgaaattgcgcgaaaccaccccaaacatgtgttttggacctaaagtagtggattgggaatgttcgttgcgaaaaacgaagaaatggttccggtggcaaaaactcgtgcttgtatgcaacccgacacccgttttcgaaataggtgacgtgcggcaacgaaattgcgtgaaaccaccccaaacatgagttttggacctaaagtagtggattgggcatgttcgttgcgaaaacgaagaaatggttccggtggcaaaaactcgtgcttgtatgcaccccgacacccattttcggaatgggtgacgtgcggcaacgaaattgcacgaaaccaccccaaacatgtgttttggacctaaagtagtggattgggcatattcgttgcaaaaaacgaagaaatggttccggttgcaaaaactcgtgctttgtatgcactgcgaacccattttcagaatgagtgacgtgcggcaacgaaattgcgcgaaaccaccccaaacatgagttttggacctaaagaagcggattgagcatgttcattgcgaaaaacgaagaagtggttccggtggcaaaaactcgtgcttgtatgcacccccgacacccgttttcggaatgggtgacgtgcggcaactaaattgcgtgaaaccaccccaaacatgtgttttggacctaaagtagtggattcaggatgttcgttgcgaacaacgaagaaattgatccggtggcaaaaactcgtgctttgtatgcaccccgacacccattttcggaatgagtgacgtgcggcaacgaaattgcgcgaaaccaccccaaacatgagttttggacctaaagtagtggattgggcatgttcgttgcgaaaaacgaagaaatgattccggtggcaaaaactcgtgctttgtatgcaccccgacacccgttttcgaaatgagtgacgtgcggcaacgaaattgcgcgaaaccaccccaaacatgagttttggacctaaagtagtggattgggcatgttcgttgcgaaaaacgaagaaatggttccggtggcaaaaactcatgctttgaatgcaatccaacacccattttcggaatgggtgacgtgcggcaacgaaattgcgcgaaaccaccccaaacatgagttttggacctaaattagtggattgggcatgttcgttgcgaaaaacgaagaaatggttccggtggcaaaaactcgcgctttgtatgcaccgcgacacctgctttcagaatgggtgacgtgcggcaacgaaattgcgcgaaaccaccccaaacatgagttttggacctaaattactggattgggcatgtttgttgcgaaaaaagaagaaatggttccggtggcaaaaactcgtgctttgtagcaccccgacacccgttttcggaatgggtgatgtgcggcaacgaaattgcgcgaaaccaccccaaacatgagttttggacctaaagtagtggattgggcatgttcattgcgaaaaacgaagaaatggttctggtggcaaaaactcgtgcttgtatgcacctcgatacccgttttcggaatggattacgtgcggcaacaaaattgcgcgaaaccaccccaaacatgagttttggacctaaagtagtggattggacatgttcattgcgaaaaacgaagaaatggttccggtggcaaaaactcatgctttttatgcaccccgacacccgttttcgtaatgggtgacgtgcggcaacgaaattgcgcgaaaccaccccaaacatgagttttggacctaaattagtggattgggcatgttcgttgcgaaaaacgaagaaatggttccggtggcaaaaactcatgctttgtatgcaccccgatacccgttttcggaatgggtgacgtgcggcaacaaaattgcgcgaaaccaccccaaacatgtgttttggacctaaagtagtggattgggcatgttcgttgtgaaaaacgaggaaatggtttcggtggtaaaaactcgtgcttgtatccaccccgacacccgtnttcggaatgagtgacgtgcggcaacgaaattgcgcgaaaccaccccaaacattagttttggacctaaagtagtggattgggcatgttcgttgtgaaaaacgaagaaatggttccggtggaaaaaactcgtgcttgtatgcaccccgacacccgttttcgaaatgggtgacatgcggcaacgaaattgcgtgaaaccaccccaaacatgtgttttggacctaaagtagtgga

SEQ ID NO: 512 - DNA, 2719 bp, Zea mays
  source (0)...(0): Zea mays BAC clone full insert sequence contig bacm.pk155.l13.fis76
tcgtgcttgtatgcaccccgacacccgttttcggaataggtgacgtgcggcaacgaaattgcgcgaaaccaccccaaacatgagttttggacctaaagtagtggattgggcatgttcgttgcgaaaacaaagaaatggttccggtggcaaaaactcgtgcttgtatgcaccccaacacccattttcggaatgggtgacgtgcggcaacgaaattgcaagaaaccaccccaaacatgagttttggacctaaagtagttgattgggcatgttcgttgcgaaaaacgaagaaattgatccggtggcaaaaactcgtgctttctatgcaacccgacacccgtttttggaatgagtgacgtgcggcaacgaaattgcgcgaaaacaccccaaacatgagttttggacctaaagaagcggattgagcatgttcattgcgaaaaacgaagaagtggttccggtggcaaaaactcgtgcttgtatgcacccccgacacccgtttttggaatgggtgacgtgcggcaactaaattgcgtgaaaccaccccaaacatgtgttttggacctaaagtagtggattcagcatgttcgttgcgaaaaacgaagaaattgatccggtggcaaaaactcgtgctttgtatgcaccccgacacccattttcggaatgagtgacgtgcggcaacgaaattgcgcgaaaccaccccaaacatgagttttggacctaaattagtggattgggcatgttcgttgcgaaaaacaaagaaatgattctggtggcaaaaactcgtgctttgtatgcaccccgacacccattttcggaatgagtgacgtgcggcaacgaaattgcgcgaaaccaccccaaacatgagttttggacctaaagtagtggattgggcatgttcgttgcgaaaaacgaagaaatggttccggtggcaaaaactcgtgcttgtatgcatcccgacacccgttttcggaatgggtgacgtgcagcaacaaaattgcgcgaaaccaccccaaacaggtgttttggacctaaagtagtggattgggcatgttcgttgcgaaaaacaaagaaatggttccggtggcaaaaactcctgctttgtatgcactgcgacacccgttttcggaatgagtgacgtatggcaacgaaattgcgcgaaaccacccgaaacatgagttttggacctaaagtagtggattgggcatgttcgttccgaaaaacgaagaaatggttccggtggcaaaaactcgtgctttgtatgcaccccgacacccgttttcggaatgggtgacgtgcggcaacgaaattgcgcgaaaccaccccaaacatgtgttttggacctaaagtagtggattgagaatgttcgttgcgaaaaatgaagaaatggttccggtggcaaaaactcgtgcttgtatccaccccgacacccgttttcggaatgagtgacgtgcgacaacgaaattgcgcgaaaccaccctaaacattagttctggacctaaagtagtggattgggcatgttcgttgcgaaaacgaagaaatggttccggtggcaaaaactcgtgcttgtatgcaccccgacacccattttcgaaatgggtgacgtgcggcaacgaaattgcgtgaaaccaccccaaacatgtgttttggacctaaagtagtggattgggcatgttcgttgcgaaaaacgaagaaatggttctggtggcaaaaactcgtgctttctatgcacagcgacacccgttttcggaatgagtgacgtgcggcaacgaaattgcgcgaaaccatcccaaacattagttttgtacctaaagtagtggattgggcatgttcgttgtgaaaaacgaaaaaatggttccggtggcaaaaactcgtgcttgtatgcaccccgacacccgttttcggaataggtgacgtgcgacaacgaaattgcgcgaaaccaccccaaacatgagttttggacctaaagtattggattgggcatgttcgttgcgaaaaacgaagaaatggttctggtggcaaaaactcgtcctttgtatgcaccccgacacccgttttcggaatgggtgacatgctgcaatgaaattgcgcgaaaccaccccaaacatgtgttttgaacctaaagtagaggattgggcatgttcgttgcgaaaaacgaagaaatggtttcggtggcaaaaactcgtgcttgtatgcaccccgacatccgtttttggaatgggtgacgtgtggcaacgaaattgcgcgaaaccaccccaaacattagttttggacctaaagtagtggattgggcatgttcgttgcgaaaaacgaagaaatggttccggtggcaaaaactcgtgctttgtatgcacagcgacacccgttttcggaatgggtgacgtgggacaacgaaattgcgcgaaaccaccccaaacatgtgttttggacctaaagtagtggattgggaatgttcgttgcgaaaaacgaaaaaatggtcccggtggcaaaaactcgtgcttgtatgcaccccgacacccgttttcggaataggtgacgtgcgacaacgaaattacgcgaaaccaccccaaacatgagttttggatctaaagtattggattgggcatgttcgttgcgaaaaacgaagaaatggttctggtggcaaaaactcgtgctttgtatgcaccccgacacccgttttcggaatgggtgacatgcggcaatgaaattgcgcgaaaccactcca

SEQ ID NO: 513 - DNA, 2764 bp, Zea mays
  source (0)...(0): Zea mays BAC clone full insert sequence contig bacm.pk155.l13.fis77
cacttcttttggcctcggatgcgcgctgatgttgagcgccttgttgcacgctacactacttgtcagaaagctaagtcacggttgaacaaccatggtttgtatatgcctttgtctgtcccttcttctccttggcttgatatttctatggactttgttttgggcttgcctagaactaagaaggggagggatagtatttttgtggttgttgatagattctctaaaatggctcactttataccttgtcataaaactgatgatgctagcattgttgctgaattgttctttagagaaattattcgtttacatggtattccaaaaacaatagtctctgatcgcgatgctaagtttctaagccatttttggagatctctttggaataaattggaaactaaattggaataaatctgcgctgtcttcgtgtattcagaactccaccctcgagtaatagattagattgctcgcatctttttcttgttcgttcttcgattgcgcacaggaaacgatcttcgtgatcaggccgatctcgcatcagcaaggtcggtaaccacaaggagttggttcagcgattgcattggcgcctcgggcttgctcgtcgtagtcggatcgcaagggtcgtcttccgccaaatcggaattatctcctctcgccgaaagatcgggcacctcagctacatcaacttactcctggcaactctctaggatcatatatcgtccccacagaccaacacgagtcttttatgcggactttgtcctcactcatgtgtcacccaagaaaacttcccggtcggtcacccatcctaaattgctccaagccaagcacgcttaacttggaggttctttcgagataggcttccgaaaaagaagatgcaccttgttgatatgattactctattaattctattaagcattgggccaggatatcccatctcaggggctaggatatcacaacccagagtaaaatggtcgttctaaggactatagacctctgtccctgccttgactttgatatcccttcaaaagttggtcataccgaccaagactatgttctactgtatattataccttgctgaaaattgtgttttattctaatccttcatttatttatggttcattacttgctggtcatattaattctgttctcactcttttgcttgcggtgtcttttgtagatggctcgtcttagacacactacacgaaagtccgtcatccccttcttaccctcccgccttgctgagcgtccgcttcgccgtcccgtggccggagagtccagtcacttggagaggctgcaccaccgcctgcatgaggagcaggaacgtcgacgataggagcagcagggctcttctttctcgctgcaccaggagatagagtccgtgaggagctgctcccctgtgcttcctctggaggcgccccctgcaccactactgggcgccccagcttctggagtagctgctggaggagacccagacgacggaggtggcgacgacagctcgagccacgacaccgacttctctgctgaccaggagccgaaaggatgggttgctcgacccatcactcgcgacgttgctcgcgggtgtcatttccacgatgcgctcgacaccctgctacgtcgggcacttaaccggcgtacctggtccatcgagtatcgctgtgtggtctaccaacatagtcgcggggtctacccggaccgctgggaggcgacctgcttggtgcgccgtccggagaacagtctccaaggtgctgaggtctgctcagagcactattctatctctgagcgggactcagctgaggcggccatgcaagatgctgcacggcgtgcgctttcgcactactgctcggttcttggtggggtagctgacggtctcaacctgaagtactacccccgccgtccatctggcagcacaggaggcgtgattgtttcacctgtcggtgaggacaatcctaggttgagcagcacagtcaacctagccgtcgtgctaaacacggagctggaccatgccctagacgagctgagtagggctcgtgctgagatcgccctgctgcgggctgagcgcgcggaacgtcgtcacctggatgatgtttcccccgctcccgtcgggactcagcacccgtaccgctcacctcggcgtggacgccagtcttatggcaatcccgactgcaagaccaagataaatctagaaccatagatcgttagagttggatcttgtaattaatacaaaatatatacgtagaagttacagtcttagtgttagtcttgcccttagttagtcttagttagacaggatagtttgctatatcctgtgcatttatgtttgtcatgatgaactatgtttggtttggatctttgtaatgactgtcaccagagtgtgggtatcccctgcattttggtttacctattatgttaatggagttagttatatagttgggaaaccttttattccactttcctctttatctgagaagctgtgtggtctgtgttggagatcagtgaggatgctcatctgttcagtgctgttgaaggattctatactcttttcttatgctgcaagattggccagatcagttctgatgtgtggttgcattctgcagatgtcagagaataggcgcagaggaggaaggcgtgctcagcaggagcgagccgctcagcaggatgaggtgccccagcaacagcacctgccacccccgcccccgatgtcgatcgagcagatgtttctgatgcagactcaggcagttcaagccatcggtcagactctggccgccattcagca

SEQ ID NO: 514 - DNA, 3534 bp, Zea mays
  source (0)...(0): Zea mays BAC clone full insert sequence contig bacm.pk155.l13.fis78
tcccgttcttgtgtttaataatgtaaggaaaggactcaatgaattcgacccatttagcatgacgacggttcagatttgtttgggtacaaatatgttttaaagcctcatgatcagaatgaattatgaactcatgatgccaaagatagtgctgccaggtatgcaaagtgcgcactaaagcgtaaagctccttatcataagtagaatatttcagactagcaccgcttaatttttcactaaaataagcaactggttttccttcttgtaacaaaacagcacctagcccaataccgctagcatcgcattcaagctcaaaaactttattaaaatcagacaattgcaagaggggagcttgggttaacttatctttcaaagtgctgaacgctacctcctgcgaatcaatccaagcaaacggtacatctttctttgtaagctcatgtagaggcactgcaatggagctaaaatcacgaacaaatctgcggtagaaaccagcaagtccaagaaagctccgaatttgtgtgaccgtcgtcggtgtaggccactcccgaatggcagcaatcttgctgctatccacctcaatgccctgcggagtaaccacataaccaagaaacgagacgcgttgcgtgcaaaatgtgcacttttccatgttaccaaacaagcgagcagcacgcaaagcatcaaaaacagcacgcaaatgttctaaatgctcccctatagacttgctgtaaataaggatatcatcgaaataaacaacaacaaacaaacctatgtaggcccgtagaacttcgttcattaaacgcataaaggtgctgggagcattagtcaatccaaatggcataaccaaccattcatataaaccaaatttcgttttaaaagccgttttccattcatcaccgagtttcattctaatctgatggtaaccgctacgcaaatcaaccttagagaaaataacggcaccactaagctcatcaaacatatcatcaaggcgtggaataggatatcaataacgaactgtgatgttattaatagcacgacaatctacgcacatacgccatgacccatctttctttggaacgagtaaaacaggaaccgagcaagggctaagagactcacgaatgtaacctttatcaagcagcgtctgcacctggcgcttctcatgtttagggtggtttcgcgcaatttcgttgccgcacgtcacccattccgaaaacgggtgacgggttgcatacaaagcacgagtttttgccaccggatcaatttcttcgtttttcacaacgaacatgcccaatccactactttaggtccaaaactcatgtttggggtggtttcgcgcaatttcgttgccgcacgtcacacattccgaaaatgggtattgggttgcattcaaagcacgagtttttgccaccggaaccatttcttcattcttcggaatgaacatgcccaatccaatactttaggtccaaaactcatgtttggggtggtttcgcgcaatttcgttgctgcacgtcactcattccgaaaacgggtgtcagggtgcatacaaagcacgagtttttgccaccggaatcatttcttcgtttttcgcaacgaacatgcccaatccactactttaagtccaaaacacatgtttggggtggtttcgcgaaatttcgttgccgcacgtcacccattccgaaaacgggtgcatacaagcacgagtttttgccaccagaaccattttttcgtttttcgcaacgaacattcccaatccactactttaggtccaaaactcatgtttgggggtggtttcgcgcaatttgattgccgcacgtcacccattccaaaaacgggtgtcggggtgcatacaagcacgagtttttgccaccggaaccattttttcgtttttcgcaacgaacattcccaatccactactttaggtccaaaacacatgtttggggtggtttcgcgcaatttcgttgtcccacgtcacccattccgaaaacgggtgtcggggtgcatacaagcacgagtttttgccaccggaaccatttcttcgtttttcgcaacgaacatgcccaatcctctactttaggtccaaaacacatgtttggggtggtttcacgcaatttcattgccgcatgtcacccattccgaaaacgggtgtcggggtgcatacaaagcacgagtttttgccaccgaaaccatttcttcgtttttcgcaacgaacatgcccaatccaatactttaggtccaaaactcatgtttggggtggtttcgcgcaatttcgttgtcgcacgtcacctattccgaaaacgggtgtcggggtgcatacaagcacgagtttttgccaccggaaccattttttcgtttttcgcaacgaacattcccaatccactactttaggtccaaaacacatgtttggggtggtttcgcgcaatttcattgtcccacgtcacccattccgaaaacgggtgtcggggtgcatacaagcatgagtttttgccactggaaccatttttcgtttttcgcaacgaacattcccaatccactactttaggttcaaaacacatgtttggggtggtttcgcgcaatttcgttgtcccacgtcacccattccgaaaacgggtgtcggggtgcatacaagcacgagtttttgccaccggaaccatttcttcgtttttcgcaacgaacatgcccaatcctctactttaggtccaaaagacatgtttggggtggtttcgcgcaatttcattgccgcatgtcatccattccgaaaacgggtgttggggtgcatacaaagcacgagtttttgccaccggaaccatttcttcgtttttcgcaacgaacatgcccaatccaatactttaggtccaaaactcatgtttggggtggtttcgcgcaatttcgttgtcgcacgtcacctattccgaaaacgggtgtcggggtgcatacaagcacgagtttttgcccacggaaccatttttttcgttttttcgcaacgaacattcccatccactactttaggtccaaaaacacatgtttgggggtggttcgcgcatttcattggtcccacgttcaccaatttccgaaaacggggtgtcgggggttgcatacaaagccacgagttttttgccaacggaaaccatttttttcctttttttcgcaacgaaaaatttcccaaatcccctaattttatggcccaaaaaaccatttttttgggggggggttccccgcaaattttcgttggcccccccgtttcccccatttccgaaaaaaggggggtgggggggggccaaacaaaaacaccagagtttttttgccccaccggaaaacatttttttttttttttttttcgcaaagaagaaattgcccaatctccttttttttttgggccccaaaaaaccctgttgggggggggggttccccgaaattttttttgtggccggggttcccccaaataaaaaaaggggggtggtgggggggaacaaaaaaaggattttttttttccccccaaaaaatattttttttgtttttttttaaaaagaaaaaaaaaaaaaa

SEQ ID NO: 515 - DNA, 4135 bp, Zea mays
  source (0)...(0): Zea mays BAC clone full insert sequence contig bacm.pk155.l13.fis79
  misc_feature (1)...(4135): n = A,T,C or G
cccacaactccacatatttctacgacgagcaggtttctgtttctccacgcaatcgctcatccaatctttcaccggttccacctgttgattgcagttcaccactgtggcttggtaagcacggataagaacttgataacagcactagtgtgagcgccttgtgagcagtacacccctgtttttgtcgttggtttttctccttttggtgtttgcggcaacgaaattgcgcgaaaccaccccaaacatgagttttggacctaaagtagtggattaggcatgttcgttgcgaaaaacgaagaaattgatccggtgacaaaaacttgtgctttgtatgcacgctcgacacccgttttcggaatgggtgacgtgcggcaatgaaattgcgcgaaaccaccccaaacatgagttttggacctaaagtagtggattgggcatgttcgttgcgaaaaacgaagaaatggttctggtggcaaaaactcgtgcttgtatgcaccccgacacccgttatcggaatgggtgacgtgtggcaacgaaattgcgcgaaaccaccccaaacatgagttttggacttaaagtagttgattgggcatgttcgttgcgaaaaacgaagaaatggttcctgatgcggacatcaacaccaacacgagcacatctacacccgcagcaccttctccagcccaggcgccaccccttccacctgggccagtgactcgggcccgtgcaagagaattgaactacatcatgttgttaaagaacgaaggcccggaagaatagacgaccagcccaattgcggcccataatggacgacctagggtttgcccgcccctaggggctgcgccccctctctatttattcaggagctgcgcctcctttatttcctgagttttgttttacgttagccttagctactctcgaacacgcgcaaatctgcgctgtcttcgtgtattcagaactccaccctcgagtaatagattagattgctcgcatctttttcttgttcgttctcgatgcgcacaggaaacgatcttcgtgatcaggccgatctcgcatcagcaaggtcggtaaccacagggagttggttcagcgattgcattggcgcttcgggcttgctcgtcgtagtcagatcgcaagggtcatcttccgccaaatcggaattatctctactcgccgaaagatcgggcacctcagctacatcatcacctattctgaaaacgggtgtcgggtgcatacaagcacgagtttttgtcaccggaaccatttcttcgtttttcgcaacgaacatgcccaatccactactttaggtctaaaactcatgtttggggtggtttcgcgcaatttcgttgtcgcacgtcacccattccgaaaacgggtgtcggggtgcatacaagcacgaatttttggccaccgaaacaattttttcttttttcgaaccaaaatgccccaacccactactttagggtccaaaactcatgtttagggtgggttccgcgcaatttcgttgtcgcacgtcacccattccgaaaacgggtgtcgggttgtatacaaggcacgagtttttgcaaccggatcactttcttcgtttttcgcaacgaacatgcnccaatccactactttaggtccaaaacacatgtttggggtggtttcgcgcaatttcgttgccgcacgtcacccattccgaaaacgggtgcatacaagcacgagtttttgccaccggaaccatttcttcgtttttcgcaacgaacatgcccaatccactactttaagtccataactcatgtttggggtggtttcgcgcaatttcgttgccacacgtcacccattccaaaaacgggtgtcggggtgcgtacaaagcatgagttttggcaccggaaccatttcttcgttcttcgcaacgaacatgcccaatccactactttaggtccaaaactaatgtttgtggtggtttcgcgcaatttcgtagccgcacgtcactcattccgaaaacgggtgtcgcggtgcatacaaaggacgagtttttgccaccggaaccatttcttcgtttttcgcaacgaacatgcccaatccactaatttaggtccaaaactcatgtttggggtggtttcgcgcaatttcgttgccgcacgtcactcattccgaaaatgggtgttgggttgcattcaatgcacgagtttttgccaccggaaccatttcttcgtttttcggaatgaacatgcccaatccactactttaggtccaaaacacatgttttgggtggtttcgtgcaatttcgttgccgcacgtaacccattccaaaaacaggtgtcggggtgcatacaagcacgagtttttgccaccggaatcatttcttcgtttttcgcaaggaacatgcccaatccactactttaggtccaaaactcatgttgggggtggtttcgcgcaatttcgttgccgcacgtcactgtcacacccggttttagaaggcaaaccgaatgcgaaccatgtacgtgccaggatcagcaattcacgtacacagcagttacataacatggacatcatcacacagtgctcaaataatattaaaagggaaatagtcgattatatcatatgtctgtgacatccacatagtctttataataaatcaaagtgcggaaaagaaacgtagataaacgcggccttcacaggcagccgactggggggttgccgctaacccacgcctagaactcgtcgtagtcttggaactcctggaagtctccttccgcagcttcatcttctcctgagcagtggttgcaatgctgacaacctggggatgggggggggggtttggtgtgtagatcaagggtgagtccacatcaacatactcagcaagtatcctgtttggctgtagaaaactaagcttatgtggggataagtcaagcagtttccttttaagtgggccaaatatttatttacctatagaaaagcagggtttagcattaccaaagttattagcccaatgtacccttccaaaacggaaagaataccactacccagcaccatagtcataaccaaaaccatcaatctcattgccacctgtaaaccaaaatgtctctgatcaagtaccactaatcactggagctcccttggccgctcataaccgcgagcacggctgatatatcagttttcaaacactctgcagaggttgtgcactttacccacaagtcgtgattccctttgcgccggagagagctactccccattgaccactgcctaggtggtccagcagggcatcactacgtagcctttacaaagattccccggggctatagccgcccgttaggtttcctaaatgcaccgcactcctccccaagagggcgaacccaaacttggcagagcgagccgcatacaccgagccccattgacggcatgacgtctaagcgaactacaccccggatcctctaattattcagctaagggcaccccattccaccctcatggttgcactgttttcctgggcggtcatccatagaacaggtccttacggagaggcactcgagaaaccgctcgagcccccttaaaggccacaagtagaacatcataataagagaagggaaaacagcgtatcatagataatctcatcatgttcattgattagagtttgagtaatagcataaagctaaacaataataatccaacccaaataggtaaacgaggacaaggataacaaagctagtcaatccttaggcataaatgtgtaatgcgggaggtgaattaaagaatgaataggacagagataggtcaagggacacttgcctccaccaaccgactgctgctcaggggcttctcctgcgagtccttcgggctcctcgaccgaatcgttctctatgcgattgcaagcatacatacatccatccattcaaattaggaaacaaacagtacaccatacaagagaacaaataaaggaaatatgcatagaatatcacatacgataatgaatttaccatggttagaaagagacggggaaaggtcttacgagggttaaagcttatgctcgagacgcgttacgggtaggcaaataactagacgttacgtgctctagttccaattggttctaacaaaaggattagctacatgcactaatgtaaacgtgaccctttttagtagattaacattgaatgagata

SEQ ID NO: 516 - DNA, 3546 bp, Zea mays
  source (0)...(0): Zea mays BAC clone full insert sequence contig bacm.pk155.l13.fis80
tccactactttaggtccaaaacacatgtttggggtggtttcgcgcaatttcattgtcccacgtcactcattccgaaaacgggtgtcggggtgcatacaagcacgagtttttgccaccggaaccattttttcgtttttcgcaacgaacattcccaatccactactttaggtccaaaacacatgtttggggtggtttcgcgcaatttcgttgtcccacgtcacccattccgaaaacgggtgtcggggtgcatacaagcacgagtttttgccaccggaaccattttttcgtttttcgcaacgaacattcccaatccactactttaggtccaaaacacatgtttggggtggtttcgcgcaatttcgttgtcccacgtcacccattccgaaaacgggtgtcggggtgcatacaagcacgagtttttgccaccggaaccatttcttcgtttttcgcaacgaacatgcccaatccactactttaggtccaaaactcatgcttggggtggtttcacgcaatttcgttgccgcacgtcacccattccgaaaacgggtgtcggggtgcattcaagcacgagtttttgccaccagaaccatttttttctttttcgcaacgaacatgcccaatccactagtttaggtccaaaactcatgtcgatttcgcgcaatttcgttgccgcacgtcaccctttccgaaaacgggtgtcagggtgcatacaaagcacgagtttttgccaccggaaccatttcttcgtttttcgcaacgaacatgcccaatccagtaatttaggtccaaaactcatgtttggagtggtttcgcgcaatttcgttgccgcatgtcacccattccgaaaacgggtgtcggggtgcatacaaagcacgagtttttgccaccggaaccatttcttcgtttttcgcaacgaacatgcccaatcctctactttaggtccaaaacacatgtttggggtggtttcgcgcaatttcattgccgcatgtcacccattccgaaaacgggtgtcggggtgcatacaaagcacgagtttttgccaccgaaaccatttcttcgtttttcgcaacgaacatgcccaatccaatactttaggtccaaaactcatgtttggggtggtttcgtgcaatttcgttgtcgcacgtcacctattccgaaaacgggtgtcggggtgcatacaagcacgagtttttgccaccggaaccattttttcgtttttcgcaacgaacattcccaatccactactttaggtccaaaacacatgtttggggtggtttcgcgcaatttcattgtcccacgtcacccattccgaaaacgggtgtcggggtgcatacaagcacgagtttttgccaccggaaccattttttcgtttttcgcaacgaacattcccaatccactactttaggtccaaaacacatgtttggggtggtttcgcgcaatttcgttgtcccacgtcacccattccgaaaacgggtgtcggggtgcatacaagcacgagtttttgccaccggaaccattttttcgtttttcgcaacgaacatgcccaatcctctactttagtcccaaaacacatgtttggtgtggtttcgcgcaatttcattgccgcatgtcacccatccgaaaacgggtgtcggggtgcatacaaagcacgagtttttgccaccgaaaccatttcttcgtttttcgcaacgaacatgcccaatccaatactttaggtccaaaactcatgtttggggtggtttcgcgcaatttcgttgtcgcacgtcacctattccgaaaacgggtgtcggggtgcatacaagcacgagtttttgccaccggaaccattttttcgtttttcgcaacgaacattcccaatccactactttaggtccaaaacacatgtttggggtggtttcgcgcaatttcattgtcccacgtcacccattccgaaaacgggtgtcggggtgcatacaagcacgagtttttgccaccggaaccattttttcgtttttcgcaacgaacattcccaatccactactttaggtcaaaacacatgtttggggggggtttcgcgcaatttcgttgtcccacgtcacccattccgaaacgggtgtcggggtgcatacaagcacgagtttttgccaccggaaccatttcttcgtttttcgcaacgaacattcccaatgcactactttaggtccaaaactcatgtttggggtggtttcacgcaattttgttgccgcacgtcacccattacgaaaacgggtgtcggggtgcatacaaagcatgagtttttgccagcggaaccatttttcgtttttcgcaacgaacatgcccaatccactactttaggtccaaaacacatgtttggggtggtttcgcgcaatttcgttgccgcacgtcacccattccgaaaacaggtgtcggggtgcatacaagcacgagtttttgccaccggaaccatttcttcgttttttgcaatgaacattccccatccactactttatgtccaaaacacatgtttggggtggtttcgcgcaattttgttgccgcacgtcgcccattcggaaaacgggtgtcggggtgcatacaaagacgagtttttgccaccggaaccatttcttcgtttttcgcaacggacatgcccaatccactactttatgtccaaaacacatgtttcgggtgatttcgcgcaatttcgttgccgcgcgtcacccattccgaaaacgggtgtcggggtgcatacaagcacgagtttttgccaccggaaccatttcttcgttttttgcaacgaacattctcaatccactactttaggtccaaaactcatgtttggcgtggtttcgcgcaatttcgttgtcgcatgtaacccaatccaaaaacgggtgtcggggtgcatacaaagcacgagtttttgccacaggatcaatttcttcatttttcacaacgaacatgaccaatccactactttaggtccaaaacacatgtttggggtgttttcgcgcaatttcgttgccgcacgtcacccattccgaaaacgggtgttggggtgcatacaagcacaagtttttgccaccgaaaccatttcttcgtttttcgcaacgaaaaagcccaatccactactttaggtccaaaactcatgtttggggtggtttcgcgcaatttcgttgccacatgccaaaaacgggtgtcggggtgcgtacaaagcatgagttttggcaccggaaccatttcttcgttttttgcaacgaacatgcccaatccactactttaggtctaaaactcatgtttggggtggtttcgcgcaatttcattgccgcacgtcactcattctgaaaacgggtgtcggggtgcatacaaagcacgagttttcgccaccggaaccatttcttcgtttttcgcaacgaacatgcccaatccacaactttaggtccaaaactcatgtttggggtggtttcgcgcaatttcgcacgtcactcattccgaaaatgggtgttgggttgcattcaaagcacgagtttttgccaccgtaaccatttcttcgtttttcgcaacgaacatgcc

SEQ ID NO: 517 - DNA, 4125 bp, Zea mays
  source (0)...(0): Zea mays BAC clone full insert sequence contig bacm.pk155.l13.fis81
ttcagaaggaacagagggcgatcgatcaagttgtttagcagttatagcagctcgggcaagatcatctttaacaatttgttcaggtgtcattggatgtataattattttctgacccttaaaaatgaaagaataatgattcgaacgaccatgatgcaagctatcggtatcatattgccaaggtcgaccaagtaacaaagagcatgcttccatgggaataacatcacaatcaacaaaatcagaataagcacccatggagaaaggaactcgcacggaacgcgtgatttttattttaccaccatcattaagccattgaatgtgatatgggtttggatgcttacgagtgggtaacgacaacttttcgaccagcatggtactcgccaaattgttgcaactgccgctgtcgataatgatgcgaattgaccgctcctgcacaacaccctttgtatggaacagagtgtgtcgctgattcttctcgggcaaagcgacctgtgtactgagaacacgctgcacaacaagactttcatacctatcagcgtcgctcgggttgacatgtacctccgccttagctgcatggtcagtggcaagtagtgcatgttcaatttcttcagaatcactagcggaagagtactcaccatcgtcacgaatgagtaaagtgcgctgacactgaatatcccgtgtacgacctatgggtggggcagtgctggctggtttggtcgtcttctcgcgtggagtagtggtggacgtggatggcgcagggggaactggtgctgaggtggatgtcgagcttcgtcctgcaaaagggttagaatatggcttcgagcggcgtccctgcacttcacgttcagctttgcaagcatattcaaataaagtagtcatatcataatattccttataatcaagtatatcttggatttcgcggtttaaaccaccacgaaaacgtgccatagcagcgtcgttgtcctccaatatcccacaacgaatcatacctttctgtaactcctggaaatagtcctcaacagattgagaaccttgctgaaaacgctgcattttattaagcaaatcacgagcataatacgaaggcacaaatcgatgtcgcatcgcagctttcaactgatcccaagtggttggaatggtagtgggatgttttattttaaactcacgccaccaaattaaagcaaaatcagtaaattcactaatagcagctttaacctgagaatgtgcagcaatatcatggcatgaaaatttttgttcaacctctaactcccaatcaagatatgcagcaggatcatatttgccattaaaaggtggaattttaaatttaatcttagaaaataagtcattagggggatgacgaaccacacggcgtgcacgaccacggcgatctccatcgtcccactcagtgtcaccgccgtagtcctgctccatctttgtggtcaacgcatcaaggcgtgccaggatggtgtcgagtgtggtgcgagtcgccatttgagcaaggtcaagctggttgaaacgctcggtcatcgaagtgaccgttgaatcaagccgttcatgcatcgtcctaatgtcatcagcaagtccatcaacttgtccctttacttccagcaactgggcatccaccgtgtcatgtgctcctgccatagttagagcaaacaccaaaacaccaaaaaaacgacaaaaacaggggtgtactgctcacaaggcgctcacactagtgctgttatcaaattcttatccgttcttaccaagccacagtggtgaactgcaaccaacaggtggaaccggtgaaagattggatgagcgattgcctggagaaacagaaacctactcgtcgtagaaatatgtggagttctgggtaggctgcactcaagtcaaggattagcacgaccaaacaataatgcaaagttgaattatagtgcaaaacacgaaactatattgctggccacaagtgcaaaggacggatggaactagcagaatggcagtaccgtaaatattgtactagcgaggccactagtaggaatcacaagtgattttgtttttcttttttgtatgatttttttgatatttttctcagcacaagaagcaacaaaataggagctacacgaagtttcacctcaaacagagttcaaatgtggtctacagaaaatcaggaagttctctgaaaagcgtgcgagaactttgacggattttttctttattttcctgaatttttttgacaattttgtcgaacccaaacagaccaaaggtcagtttggccggcctcagaatggtgtcaactagctcctgtaaaaatttcagattttttggacacccgagcgaaaagttatgcccggtttaaggaaggtacctcaaattatgttttcaaacgaccgggatgaaacaactgtatcctttctccttcgttgttttttgtttctgttttttttgacgtaaccgaaggagaaaaacaaggaaacgatgttgactcggttttttttttctgtttttttgacgtaaccgaaggagaaaaacaaggaaacaatgttgactcggtttgttttttctgtttttttttgacgtaaccgaaggagaaaaacaaggaaacaatgttgactcggtttgtggcgtgatcaaaggggagatggtggcggcgctaggatttgaatggtggaagaacacaatgcaaccagcaacaaatgacgcgaaagcacacaaattcaacaatgcagattattgaaagaaagtgcgaggctcaaaagggtgctgggataaggtataacctgaatttttatgtggttttgtggactgtaggaaaaaaaactcgataaactcaccgatcaacctggaaatctgataccaattgatgtagctgaggtgcccgatctttcggcgagtagagataattccgatttggcggaagatgacccttgcgatccgactacgacgagcaagcccgaggcgccaatgcaatcgctgaaccaactccctgtggttaccgaccttgctgatgcgagatcggcctgatcacgaagatcgtttcctgtgcgcaatcgaagaacgaacaagaacaagatgcgagcaatctaatctattactcgagggtggagttctgaatacacgaagacagcgcagatttgcgcgtgttcgagagtagctaaggctaacgtaaaacaaaactcggaaaataaaggaggcgcagctcctgtataaatagagagggggcgcagcccctaggggcggccaaccctaggtcgtccattatgggccgcaattgggctggtcgtctattcttctgggccttcgttctttaacaacatgatgtagttcaattctcttgcacgggcccgagtcactggcccaggtggaaggggtggcgcctggactggggaagatggtgcctgggctggagaaggtgctgctggtgtagatgtactcgtgttggtgttgatgtcctcatcacattccgaaaacgggtgtcggggtgcatacaagctcgagtttttgccaccggaaccatttcttcgtttttcgcaacgaacatgcccaatccactactttaggtccaaaactcatgattggggtggtttcgcgcaattttgttgccgcacgtcgctcattccgaaaacgggtgtcgcggtgcatataaagcacgagtttttgccaccggaaccatttattcgtttttcgcaacggacatgcccaatccactactttaggtccaaaacacatgtttggggtggtttcgcgcaatttcgttgccgcacgtcacccattccgaaaacgggtgtcggggtgcatacaaagcttgagttttttccaccggaaccatttcttcgttttcacaacgaacatgcccaacccactaccaatccactactttaggtccaaaactcatgtttggggtggtttcgcgcaatttcgttgccgcacgtcacccattccaaaaacgggtgtcgggttgcatacaaagcacgagtttttgccaccggatcaatttcttcgtttttcgcaacgaacatgcccaatcaactactttaggtccaaaactcatgtttggggtggtttcttgcaatttcgttgccgcacgtcacccattccgaaaatgggtgttggggtgcatacaagcacgagtttttgatcaagcggaaa

SEQ ID NO: 518 - DNA, 6651 bp, Zea mays
  source (0)...(0): Zea mays BAC clone full insert sequence contig bacm.pk155.l13.fis82
tctgcgccaacaaaattcgcgaaccccccaaacatgattttggacctaagtagtgattgggcatttcgttgcgaaaacgaagaaatggtccggtggcaaaattcgtgcttgaatgcactccaacaccgtttttcggaatgggtgacgtgcgacaacgaatttgcacgaaaccacccaaaacataagttttggacctaaattagtagattgggcatgttcgttgcgaaaaacgaagaaatggttccggtggcaaaaactcgtgcttgtatgcaccccgacacccgttttcggaatgggtgacgtgcgacaacgaaattgcgcgaaaccaccccaaacatgtgttttggacctaaagtagtgaattgtgagtgttcgttgcgaaaaacgaagaaatggttccggtggcaaaaacttgtgcttgtatgcaccccgacacccgttttcggaataagtgacgtgcaacaacgaaattgcgcgaaaccaccctaaacatgtgttttggacctaaagtagtggattgggcatgttcgttgcgaaaaacgaagaaattgatccggtggcaaaaacttgtgctttgtatgcaacccgacacccgttttcggaatgggtgacgtgcggcaacgaaattgcgcgaaaccaccccaaacatgagttttgtacctaaattagtggattgggcatgttcgttgtgaagaacgaagaaatggtttcggtggcaaaaactcgtgcttgtatgcaccccgacacccattttcggaatgggtgacgtgcggccacgaaattgcgcgaaaccaccccaaacatgagttttggacctaaagtagtggattaggcatgttcgttgcgaaaaacgaagaaattgatccggtgacaaaaactcgtgcttgtatgcaccccgacacccattttcggaatgggtgacgtgcggccacgaaattgcgcgaaaccaccccaaacatgagttttggacctaaagtagttgattgggcatgttcgttgcgaaaaacgaagaaatggttccggtgccaaaactcatactttgtacgcaccccgacaccccgtttttggaatgggtgacgtgcggcaacgaaattgggcgaaaccaccccaaacatgtgttttggacctaaagtagtggattgggcatgttcgttgcgaaaaaggaagaaatggttccggtggcaaaaactcgtgctttgtgtgcaacccgacacccgttttcggaatgggtgacgtgctgcaacgaaattgcgcgaaaccaccccaaacatgtgttttggacctaaagtcggcctgttcgttgcgaaaaatgaagaaacgattccggtggcaaaaactcgtgcgtgtatgcaccccgacagccgttttcggaatgggtgacgtgcggcaacgaaattgcacgaaatcaccccaaacatgtgttttggacctaaagtagtggattcagcatgtctgttgcgaaaaacgaagaaattgatcctgtggcaaaaactcgtgctttgtttgcaccccgacacccgtttttggattgggttacattacatgcggcaacgaaattgcgtgaaaccacgccaaacatgagttttggacctaaagtagtggattgggaatgttcgttgcgaaaaacgaagaaatggttccggtggcataaactcgtgctttgtatgtaacccaacacccgttttcggaatgagtgacgtgctgcaacgaaattgcgcgaaaccaccccaaacatgtgttttggacctaaagtcggcctgtttgttacgaaaaatgaagaaacggttccagtggcaaaaactcgtgcttgtatgcaccccgacacccgttttcggaatgggtgacgtgcggcaacgaaattgcgcgaaatcaccccaaacatgtgttttggacctaaagtagtggattgggcatgtccgttgcgaaaaacgaagaaattgatcgtgtggcaaaaactcgtgctttgtatgcaccccgacacccgtttttggattgggttacatgcggcaacgaaattgcgcgaaaccacgccaaacatgagttttggacctaaagtagtggattgggaatgttcgttgcgaaaaacgaagaaatggtttcggtggcataaactcgtgcttgtatgcaccccgacacccgttttcggaatgggtgacgtgcggcaacgaaattgcgcgaaaccaccccaaacatgaactttgggcctaaattagtggattgggcatgttcgttgcgaaaaacgaagaaatggttccggtggcaaaaactcgtctttgtatgcaccccgacacccgttttccgaatgtgcgacgtgcggtaacgaaattgcgcgaaaccaccccaaacatgagttttggacctaaagtagtggattggacatgttcgttgcgaaaaatgaagaaatggttccggtggcaaaaactcgtgctttgtatgtaacccaacacccgttttcggaatgggtgacgtgctgcaacgaaattgcgcgaaaccaccccaaacatgtgttttggacctaatgtcagcctgtgcgttgcgaaaaatgaagaaacggttccggtggcaaaaactcgtgcttgtatgcaccccaacacccgttttcggaatggtagacgtgtggcaacgaaattgcgcgaaaccaccccaaacatgtgttttggacctaaagtagtggattaggcatgttcgttgtgaaaaacgaagaaattgatccggtggcaaaaactcgtgctttttatgcaccccgacacccgttttcggaatggggggacgtgcggcaacgaaattgcgtgaaaccaacccaaacatgagttttggacctaaagtagtggattgggaatgttcgttgcaaaaaacgaagaaatggttccggtggcaaaaactcgtgcttgtatgcacaccgacacccgttttcggaatgggtgacgtgcggcaacgaaattacgcgaaaccaccccaaacatgtgttttggacctaaattagtggattgggcatgttcattgcgaaaaacgaagaaacggttccggtggcaaaaactcgtgcttgtatgcaccctgacacccgttttcggaatggtagacgtgtggcaacgaaattgcgcgaaaccaccccaaacatgtgttttggacctaaagtagtggattgggcatgttcgttgtgaaaaacgaagaaattgatccggtggcaaaaactcgtgctttgtatgcaccccaacacccgttttcggaatgggtgacgtgcggcaacgaaattgcgcgaaaccaccccaaacatgagttttggacctaaatagtggattgggaatgttcgttgcaaaaaacaaaatggttccagtgacaaaaacttgtgctttgtatgcaccgacacccgttttcggaatgggtgacgtgctgcaacgaaattgcccgaaaccaccccaaacatgagttttggacctaaagtaatggattgggcatgttcgttccgaaaaacgaagaaatggttccagtggcaaaaactcgtgcttgtatgcaccccgacacccgttttcggaatgggtgacgtgcgacaacgaaattgtgcgaaaccaccccaaacatgtgttttggacctaaattagtggattgggcatgttcgttgcgaaaaacgaagaaatggttccggtggcaaaaaaactcgtgcttgtatgcacgctcgacacccgttttcagaatgggtgacgtgcggcaatgaaattgcgcgaaaccaccccaaacatgagttttggacctaaagtagtggattgggcatgttcgttgcgaaaaacgaagaaatggttctggtggcaaaaacttgtgcttgtatgcaccctcaacacctgttttcggaatgggtgacgtgcagcaacaaaattgcgcgaaaccaccccaaacatgtgttttggacctaaagtagttgattgggcatgttcgttgcgaaaaacgaagaaatggttccggtggcaaaaactcgtgctttgtatgcaccccgacacccgtgctttgtatgcaccccaacacccattttcggaatgggtgacgtgtggcaactaaattgcgcaaaaccaccccaaacatgagttttggacctaaagtagtggattgggcatgttcgttgcgaaaaacgaaagaaatggatccagtggcaaaaactcgtgctttgaatgcaccccgacacccgttttcggaatgggtggcgtgcggcaacgaaattgcccgaaacaccccaaacatgagttttggacctaaattagtggattgggcatgttcgttgcgaaaaacgaagaaatggttccggtggcaaaaactcgtgcttgtatgcaccccgacacccgttttcggaatgggtgacgtgaggcaacgaaattgcgcgaaaccaccccaaacatgagttttggacctaaattattggattgggcatgttcgttgcgaaaaacgaagaaatgtttccggtggcaaaaacttgtgcttgtatgcaccccgacacccgttttcggaatgggtgacgtgcggcaacgaaattgcgcgaaaccaccccaaacatgagttttggacctaaagtagtggattgggcatgtttgttgcgaaaaacgaagaaatggttccggtgccaaaactcatgcttgtatgcaccccgacacccgttttcggaatgggtgacgtgcggcaacgaaattgcgcgaaaccaccccaaacatgtgttttggacctaaagtagtggaatgggcatgtttgttgcgaaaaacgaagaaattgttcccgtgccaaaaactcatgctttgtatgcaccccgacacccgttttcggaatgtgtgacgtgcggcaacgaaattgcgcgaaacccaccccaaacatgagttttggacctaaagtagtggattgggcatgttcgttccgaaaaacgaagaaatggttccggtggcaaaaactcgtgcttgtatgcaccccgacacccgttttcggaatgggtgacgtgcgacaacgaaattgcgcgaaaccaccccaaacatgagttttggacctaaagtagtggattgggcatgttcgttgcgaaaacgaagaaatggttccggtggcaaaaactcgtgcttgtatgcaccccgacacccgttttcggaatgggtgacgtgcggcaaggaaattgcgcgaaaccaccccaaacatgtgttttggacctaaagtagtggattgggcatgttcgttgcgaaaaacgaagaaatggttctggtggcaaaaactcgtgctttctatgcacagcgacacccgttttcggaatgagtgacgtgcggcaacgaaattgcgcgaaaccaccccaaacattagttttgtacctaaagtagtggattgggcatgttcgttgtgaaaaacgaagaaatggttccggtggcaaaaactcgtgcttgtatgcaccccgacacccattttcggaatgggtgacgtgcggcaacgaaattgcgcgaaaccaccccaaacatgagttttggacctaaagtagtggattgggcatgttcgttgcgaaaaacgaacaaatggttccggtggcaaaaactcgtgctttgtatgcaccgcgacacccgttttcggaatgagtgtcgtgcgacaacaaaattgcgcgaaaccaccccaaacatgagttttggaactaaagtagtggattgggcatgttcgttgcgaaaaacgaagaaatggttccggtggcaaaaactcgtgctttgaatgcaatccaacacccgttttcggaatgggtggcgtgcgacaacgaaatttgcccgaaaccacccaaaacataagttttggacctaaattagtagattgggcatgttcgttgcgaaaaacgaagaaatggttccggtggcaaaaactcgtgcttgtatgcaccccgacacccgttttcggaatgggtgacgtgcgacaacgaaattgcgcgaaaccaccccaaacatgagttttggacctaaagtagtgaattgtgagtgttcgttgcgaaaaacgaagaaatggttccggtggcaaaaacttgtgcttgtatgcaccccgacacccgttttcggaaaggtgacgtgcgacaacgaaattacgcgaaaccaccccaaacatgagttttggacctaaagtattggattgggcatgttcgttgcgaaaaacgaagaaatggttctggtggcaaaaactcgtgctttttgtatgcaccccgacacccgttttcagaatgggtgacatgcggcaatgaaattgcgcgaaaccaccccaaacatgtgttttggacctaaagtagaggattgggcatgttcgttgcgaaaaacgaagaaatggtttcggtggcaaaaactcgtgcttgtatgcaccccgacatccgttttcggaatgggtgacgtgcggcaacgaaattgcgcgaaaccaccccaaacattagtttttgacctaaagtagtggattgggcatgttcgttgcgaaaaacgaagaaatggttccgggtggcaaaaactcgtgcttgtatgcacccccgacacccgtttttcgaatgggtgacctgtggccacgaaaattgcgccgaacccccccaaacatgagttttgggactaaaattatggaatggggcttgttcgttgcaaaaaacaaaaaaagggttccgggggcaaaaaaccctggttttta

SEQ ID NO: 519 - DNA, 5933 bp, Zea mays
  source (0)...(0): Zea mays BAC clone full insert sequence contig bacm.pk155.l13.fis83
  misc_feature (1)...(5933): n = A,T,C or G
catgtttggggtggtttcacgcaattttgttgccgcacgtcactcattccgaaaacgggtgtcgcggtgcatacaaagcacgagtttttgccaccggaaccgtttcttcgtctttcgcaacgaacaagcccaatccactactttaggtccaaaactcatgtttgaggtggtttcgcgcaatttcgttgccgcatgtaacccaatccaaaaacgggtgtcggggtgcatacaaagcacgagtttttgccacaggatcaatttctttgtttttcgcaacggacatgcccaatccgctactttaggtccaaaacacatgtttggggtgatttcgcgcaatttcgttgccgcacgtcacccattccgaaaacgggtgtcggggtgcatacaagcacgagtttttgccactggaaccgtttcttcttttttcataacgaacaggccgactttaggtccagaacacatgtttggggtggtttcgcgcaatttcattgcagcacgtcactcattccgaaaacgggcgtcgggttacatacaaagcacgaattattgccaccgaaaccatttcttcctttttcgcaacgaacatgcccaatccaatactttaggtccaaaactcatgtttggggtggtttcgcgcaatttcgttgtcgcacgtcacccattccgaaaatgggtgttgggttgcattcaaagcacgagtttttgccaccggaaccatttcttcgtttttcgcaacgaacatgtccaatccactaatttaggtccaaaacttatgtttggggtggtttcgcgcaatttcattgccacacgtcacccattctgaaaacgggtgtcggggtgcatacgagcacgagtttttgccaccagaaccatttcttcgtttttcgcaacaaacatgcccaatccactaatttaggtccaaaactcatgtttggggtggtttcgcgcaatttcgttgccgcacgtcacccattccgaaaacgggtgtcggggaggggagcaaacaaagcacgagtttttgccaccggaaccgtttcttcgattttcataatgaacatgcccaaatcactaatttaggtccaaaactcatgtttgggttggtttcgcgcaatttcgttgccgcacgtcacccattccgaaaatgggtgttgggttgcattcaaagcacgagtttttgccaccggaaccatttcttcgtttttcgcaacgaacatgtccaatcaatccactactttaggtccaaaactcatgtttggggtggtttcgcgcaatttcgttgtcgcatgtcactcattccgaaaacgggtgtcgcggtgcatagaaagcatgagtttttgacaccaaaacagtttcttcgtttttcacaacgaacatgcccaatccactactttaggtccaaaactaatgtatggggtggtttcgcacaattttgttgccgcacgtcacccattccgaaaacgggtgtcggggtgcatagaaagcacgagtttttgccaacagatcaatttctttgttttacgcaactaacatgcccaatccacaaatttaggtccaaaactcatgtttggggtggtttcgcgcaatttcgttgccgcacgtcacccgttccgaaaacgggtgtcgcggtggatacaaagcatgagtttttgccaccggatcaatatctttgtttttcgcaacgaacattcccaatccactactttaggtccaaaactcatggtcggggtggtttcgcgcaatttcgttgccgcacgtcacccattccgaaaacgggtgtcggggtgcataaaagcacgcgtttttgccaccggatcaatttcttcgtttttcgcaacaaacatgcccaatccactactttaggtccaaaacacatgtttggggtggtttcgcacaatttcgttgccgcacgtcacccattccgaaaatgggtgtcggggtgcatacaagcacgagtttttgccaccggaaccatttcttcgtttttcgcaacgaacattcccaatccactactttaggtccaaaactcatgtttggcatggtttcgtgcaatttcgttaccacatgtcacccattccgaaaacgggtgtcggggtgcatacaaagtaggcctgggcgttcgggttacccgtaaaattcgggtggagtaattcgggtaattaaatttttgggttttggaaagtcatacctgaaattgcatagggtattatagtaccggaaaatttgggtacccgataattcgggttcgggtatcgggtactcccgaagtacccggatttaaaaaatagtcactactacccgcatgaaacataaacagatcactagtaaatgcacacaagaaaaatatgatacgataaaatacattaggttctcaggaacttctagactgctcttccgtctccacgaactgctagactccagtactcctcgaactgctagactcaggttctcgtatcgagtatggaccggcgaagtctacatgctgctgtgaggtcggccggcgaccctagaccgctggagttggatggcgttcttcagcagttgggctgaacgcgtggacgagtagacaaagacgaagaccctggacggctaaaccttgacaagtagacgaagaccctgcacggcgaccctggacggcatcggacacttggtggcggcggacggatcaggtcagctagtgccgtgtggtcagctggtgccgtgtgtagggtttgtcatattgccgtgtgtaggcctgggcggtgggctggtgtgagacgtgggttgggctctaccactgtagcactgtagaccctgtacgcatgtaggctaaggctgtaccgctgtaggcacctgtagctggcttaagatttccgggttcgggttattcgaataccggcaggtgctacccgaattacccagaataatttcgggtttcataagttggtaaccgaaattcccaaataaaattcgggtacccgatattatgggtttgggttcaggaattccgggttcgggtatcgggttacgggttttttgcccaggcctaatacaaagcatgagtttttgccaccagatcaatttcttcgtttttcgcaacggacatgcccaaggtgatttcgcgcaatttcgttgccgcacgtcatccattccgaaaacgggtgtcggggtgtatacaagcgcgagttttttccatcggaactatttcttcgtttttcacaacgaacatgcccaatccactactttaggtccaaaacacatgtttggggtggtttcgcgcaatttgcttgccgcacgtcacccattctgaaaatgggtgtcggggagcatacaaagcacgagtttttgccaccggaaccatttcttcatttttcgcaacgaacatgcccaatccactaatttatgtccaaaactcatgtttggggtggtttcgcgaaatttcgttgtcgcacgtcacccattgcgaaatgggtgtcggggtgcatacaaagcacgagtttttgccaccggatcaatttcttcgtttttcgcaacgaacatgcccaatccactactttaggtccaaaacacatgtttggggtggtttcgcgcaatttcgttgcagcacgtcacccattccgaaaacgggcgtcgggggtgcatacaagcacgagttttcgccagcggaaccatttcttcatttttcgcaacgaacatgcccaatccactactttaggtccaaaactcatgtttggggtggtttcacgcaatttcgttgtcgcacgtcactcattccgaaaacgggtgtcgcggtgcatacaaagcacgagtttttgccaccggaaccatttctctgtttttcgcaacgaacatgcccaatccactactttaggtccaaaactcatgtttgaggtggttttgcgcaatttncgtgtcgcacgtcacccattcccaaaacgggtgtcggggtgcatacaaagcacaagtttttgccactggatcaatttcttcgtttttcgcaatgaacattcccaatccactactttaggtccaaaactcatgtttggggtggtttcgcgcaattttgttgccgcatgtaaaccattccgaaaacgggtgtcggggtgcatacaaagcacgagtttttgccacaggatcaatttcttcgtttttcgcaacggacatgcccaatccactactttaggtccaaaacacatgtttgggtgggttcgcgcaattttgttgccgcacgtcacccattccgaaaacgggtgtcggggtgcatacaaagcatgagtttttgccacaggatcaatttcttcgtttttcgcaacggacatgcccaatccactactttaggtccaaaacacatgtttggggtgatttcgcgtaatttcgttgccgcacgtcacccattccgaaaacgggtgtcagggtgcttacgagcacgagtttttgccaccgaaaccattacttcgtttttcgcaacgaacattcccaatccactactttaggaccaaaactcatgttcggggtggtttcgcgcaaattcgttgccgcacgtcatccattccgaaaacgggtgttagggtgcatacaaagcacaagtttttgccactggatcaatttcttcgtttttcgcaacgaacatgcccaatccactactttaggtccaaaacacatgtttggggtggtttcgcgcaatttcgttgccgcacgtcacccattccgaaaacgggtgtcggggtgcgtacaagcatgagtttttgccaccggaaccatttcttcgtttttcgcaaccaacaagcccaatccactaatttaggtccaaaactcatgtttggtgtggtttcgcgcaatttcgttgccgcacgtcacccattccgaaaatgggtgtcggggtgcatacaagcatgtgtttttgccaccggaaccatttcttcgtttttcgcaacgaacatgcccaatccactactttaggtccaaaacacatgtttggggtggtttcgcgcaatttcgttgccgcacgtcacccattccgaaaacgggtgtcggggtgcatacaaagcatgagtttttgccaccggaaccatttcttcgtttttcgcaacaaacatgcccaatccactactttaggtccaaaacacatgtttggggtggtttcgcgcaatttcgttgccgcacgtcacccattccgaaaacgggtgtcgagttgcattcaaagcacgagtttttgccaccggatccatttcttcgtttttcacaacgaacatgcccaatccactaatttaggtccaaaactcatgtttggggtggtttcgcgcaattttgttgtcgcacgtcactcattccgaaaacaggtgcatacaagcacgagtttttgccaccggaaccatttcttcgttttttgcaacgaacatgcccaatctactttaggtcaaaaactaatgtttggggtggtttcgcgcaatttcgttgccgcacgtcacccattccgaaaacggatgtcggggtgcatacaagcacgagtttttgccaccgaaactatttctttgtttttcgcaatgaacatgcccaatcctctactttaggtccaaagcacatgtttggggtggtttcgcgcaatttcattgccgcacgtcaccaattccgaaaacgggtgtcggggtgcatacaaagaacgagtttttgccaccggaaccatttcttcgtttttcgcaacgaacatgcccaatccactactttaggtccaaaactcatgtttggggtggtttcgcgcaatttcgttgtcgcacgtcacctgatgcggacatcaacaccaacacgagcacatctacaccagcagcaccttctctagcccaggcgccaccccttccacctgggccagtgactcgggcccgtgcaagagaattgaactacatcatgttgttaaagaacgaaggcccggaagaatagacgaccagcccaattgcggccca

SEQ ID NO: 520 - DNA, 757 bp, Zea mays
  source (0)...(0): Zea mays BAC clone full insert sequence contig bacm.pk010.m07.fis1
  misc_feature (1)...(757): n = A,T,C or G
ttaccctcctaaagggaaccaaatcaaacacgcgnnnnnnnnnnnnnnnnnnnnnnnnnnnnnnnnnnnnnnnnnnnnnnnnnnnntgtaagtgcaacaaaacaaaaggcagtttgtgtgccttctttttatagtttcagaaatcagattgttgttctgagcttttggtgatactatttgtgtaacggctcgcgtctctattacggtttggactaggaccagcacaacaccattgtggaacgtttattcaacttgttgtggctaacgtggtactagctattccttggaactattgtttgaacagccacctataaatccacaaaattttctacaacaccaccaggttgtgctagcagccactgttgttgttgttcgtgctgtttgccagcgcctcctgctttgcgtggtgagaacttgtaagaacttgtttaaccagtttgagagtgagagattacaacaatgattcctagtagtttatagaatcaaagatattttttattgtttcttgtctttactaaacatggcaggtgatatggacatttttgacccaaccgaacgttatattggaggcatcattcaacacttgcctttatatgccggtaaattcgatcctcatgcatacattgattgggagctaaaggtagataaggaatttgataagcatgatctatctcaaaacaaaagatttatattgcctctaatttgttactgagcacgcattgatggatgggaatacatttgagggacaacaaagtcc

SEQ ID NO: 521 - DNA, 746 bp, Zea mays
  source (0)...(0): Zea mays BAC clone full insert sequence contig bacm.pk010.m07.fis2
  misc_feature (1)...(746): n = A,T,C or G
agcagccgcattaaccctcctaggggaacaaattcagatcgccnnnnnnnnnnnnnnnnnnnnnnnnnnnnnnnnnnnnnnnnnnnnnnnnnnnnnnnnttgcaaagctgaaagggaagtgcagggacgacgtgctagtgcaaggtctaatgtttctgcaggaaaatctacaccatggcaacagcgcacgactacgtccatgaccggccgtacaccagcaccaactccctcgccaagtcgaccagcacccccgccttcctccggcgacaaaccacgtgcatcttccacaaattcagcaaccaaatctgcccagaaaccagcaggtagtgcctcttcagtagcctccacgggtagaacaagagatgttctgtgttatcgatgcaagggctatggacacgtgcagcgtgattgtcctaatcagcgtgttttggtggtaaaagacgatggtgggtattcctctgctagtgatttggatgaagctacacttgctttgcttgcggctgatgatgcaggcactaaggaaccacccgaagaacagattggtgcagatgatgcagagcattatgagagcctcattgtacagcgtgtgcttagtgcacaaatggagaaggcagagcagaatcagcgacatacgttgtttcaaacaaagtgtgtcattaaggagcgttcatgtcgtttgatcattgatggaggtagctgcaacaacttggctagcagcgacatggtggagaggcttgcacttacgn

SEQ ID NO: 522 - DNA, 764 bp, Zea mays
  source (0)...(0): Zea mays BAC clone full insert sequence contig bacm.pk010.m07.fis3
  misc_feature (1)...(764): n = A,T,C or G
tacccnnnnnnnnnnnnnnnnnnnnnnnnnnnnnnnnnnnnnnnnnnnnnnnnnnnnnnnnnnnnnnnnnnnnnnnnnnnnnnnnnnnnnnnnnnnnnnnnnnnnnntcctgcacaacaccctttgtatggaacagagtgtgtcgctgattcttctcgggcaaagcaacctgtgtactaagaacacgctgcacaacaagactttcatacctatcagcgtcgctcgggttgacatgtacctccgcctgagctgcatggttagtggcaagtagtgcatgttcaatttctttagaatcactagcggaagagtactcaccatcgtcacgaatgagcaaagtgcgcttgtttgggcagtctcgaatcacatggccaaatcctctacagcgatgacactgaatatcccgtgtacgacctgtgggtggggtagtgctggctggtttggtcgtcttctcgcgtggagtagtggtggacgtggatggcgcagggggaactggtgctgaggtggatgtcgagcttcgtcctgcaaaagggttagaatatgtcttcgagcggcgtccctgcacttcacgttcagctttgcaagcatattcaaataaagtagtcatatcataatattccttataatcaagtatatcctggatttcgcggtttaaaccaccacgaaaacgtgccatagcagcatcgttgtcctccaatatcccacaacgaatcatacctttntgtaattcctggaaatagtcctcaacatattgagaaccttgctga

SEQ ID NO: 523 - DNA, 747 bp, Zea mays
  source (0)...(0): Zea mays BAC clone full insert sequence contig bacm.pk010.m07.fis4
cgacggcgtatagactcctatcgggcgaatgggtttaaatacaagaggggaggtcgacggtatcttttccgcttgatggtgccattcgggagtggcctacaccgacgacggtcacacaaattcggagctttcttggacttgccggtttctaccgcagatttgttcgtgattttagctccattgcagcgcctctacatgagcttacaaagaaagatgtgccgtttgcttggagtgattcgcaggaggaagcattcagcactttgaaagataagttaacccaagctcccctattgcaattgcctgattttaataaagtgtttgagcttgaatgcgatgctagcggtgttgggctaggtgctgttttgttacaagaaggaaaaccagttgcttattttagtgaaaaattaagcggtgctagtctgaaatattctacttatgataaggagctttacgcgttagtgcgcactttgcatacatggcagcactatctttggcatcgtgagttcataattcattctgatcatgaggctttaaaacgtattcgtacccaaacaaatctgaaccgtcgtcatgctaaatgggtagaatttattgagtcttttccttacattattaaacacaagaacgggaaggacaatgttattgctgatgctttgtctcgtcgctataccatgctgtcacagttagattttaaaatctttggtttgcacactgtgaaagatcaatatgttgacgatgctgatttta

SEQ ID NO: 524 - DNA, 772 bp, Zea mays
  source (0)...(0): Zea mays BAC clone full insert sequence contig bacm.pk010.m07.fis5
  misc_feature (1)...(772): n = A,T,C or G
ngacccgtnnnnnnnnnnnnnnnnnnnnnnnnnnnnnnnatcaaaaaacggcgaggtcgacggtatcgtttacgcttagataaagtcgtcctcgactcaaacgtgtcattctctcccaagtatggtgttaaatctgcaatattaaaagaggaactgaccccaaaatctgcaggcaactgaactttatatgcattattattatttttgtgaagtactttgatgggtctagcagctcttggttgtaatttagatttgcgcatatcagggaatctatctgatgtagctgaggtgcccgatcttttggcgagtagagataattccgatttggcggaagatgacccttgcgatccgactacgacgagcaagcccgaggcgccaatgcaatcgctgaaccaactctctgtggttaccgaccttgctgatgcgagatcgacctgatcacgaagatcgtttcctgtgcgcaatcgaagaacgaacaagaaaaatatgcgagccatctaatctattactcgagggtggagttctgaatacacgaagacaacgcagatttgcacgtgttcgagagtagctaaggctaacgtaaaacaaaactcgaaaataaaggaggcgcagctcctggataaatagagggggcgcagcccctaggggcggccaaccctaggtcgtccactatgggccgcagttgggctggtcgtctattcttctgggccctcattcttcagtagcatgacgaagttaagatctctggcacgggcccgagtgattggcccag

SEQ ID NO: 525 - DNA, 754 bp, Zea mays
  source (0)...(0): Zea mays BAC clone full insert sequence contig bacm.pk010.m07.fis6
  misc_feature (1)...(754): n = A,T,C or G
atcgcnnnnnnnnnnnnnnnnnnnnnnnnnnnnnnnnnnnnnnnnnnnnnnnnnnnnnnnnnnnnnnnnnnnnnnnnnnnnnnnnnnnnnnnnnnnnnnnnnnnnctatgaagggccgcagaacttcattcatcactcgcataaaagtgctgggagcattagtcaatccaaatggcataaccaaccattcatataaaccaaatttcgttttaaaagctgttttccattcatcacccagtttcattctaatctggtggtaaccactacgcaaatcaatcttagtgaaaataatggcaccactaagctcatctagcatatcatcaaggcgtggtataggatagcgataacgtatagtgatgttattaatagcacgacagtctacacacatacgccatgacccatctttcttgggaacaagtaacacaggaacagagcaagggctaagagactcacgaatgtatcctttgtcaagcaacgcctgtacctggcgctgaatctccttcgtctcatccggatttgtacggtatggtgcgcggttcggaagctgtgcgccgggaatgaggtcgatctggtgctcaatgccacgaagcggtggtagacccgatggtaagtctttgggaaagacatcagcgtactcctgcaaaaggttagcaaccatagggggaatagccaaagatggtgcatcatcaagtgaaatgaggacactagagcatacaagtgcatagcatggcnaatgagcaccgtgtagatcatc

SEQ ID NO: 526 - DNA, 1047 bp, Zea mays
  source (0)...(0): Zea mays BAC clone full insert sequence contig bacm.pk010.m07.fis7
ttctatgccaagacaaatacatataaagcaacataccaaagtgataatcagttcataaagatttaccaatgtcaaagtaaattctactccattgcaaattgtaagtagtttcagctttattctgtcaatcttgtctaacttttgaccaaatttatagaaaaatatattatcaaataaatgcatatgttttttctcaaacgttagttaaatgcatatgttttctttctagaacattagttaaatgcatattacataaagtcactaacattatgacataataggcataaggacctaaacctaaacaacataaaagtaataatatttaaatagcaatataagaccagtacctgaagctgaagtgtgtgtagaatgaaattacgcacaatttcatattcccccttaagtagaaaagcaatgccggatggtatgaagtcccgaataaacacctgatcgtagttcaccggatcactgtcatttggatcgttggcagcaatcgtcccaacaggactgccacaatagtaaaccattgactcctgcagaagttcccaggcctcatcctcaaccgaagaggacttccgcctctgaggtggagtcttggcagcactcccatttagaccaccattgccacttacagcttgaccaagcacgctgatgtcgccaagaacctggctagcgttattcatggcatccttgacccaaggaccgttcccctctgtaacccggtcatcgatccgctggcacagccgcctgaccgacctcagcctcgggatccttaggacgccttgcagtgtcctggcgtttggcaccgaattggtgcggctgtttatcctcgtaaagtctggccgaagggacagaatggatgccggggagtgggtggtgaacgcccccggcatggtgtgtagagccaccaccgcgatccccattggcgcttgttcccagtccgcccagcgtctgcaagaagcgtgacagctacaatttggatacattcatacaaaaaagataaatcagaggaacccagcaagaatcgaacgaatttggaagtagatg

SEQ ID NO: 527 - DNA, 750 bp, Zea mays
  source (0)...(0): Zea mays BAC clone full insert sequence contig bacm.pk010.m07.fis8
tgttctattagcttcgttttgcaccagttaggatggctaaaggaccacccgagtgcgcgattggattacgccggcaagcctctgccgtcacacttggctgtgcggccgccctggggttcggaggaaggagacacggcgtgggccgttagatccacgatgtgcgctctagattagatctaggggtaacctaatttgagccgttgatttgatcaccggtggataagattagatcccgtttgcataaaatcttgaccctttgatcgggatcggccggtccgtaattcgtaccggttcgcgaattggtttgggccgtggattgctgatatgacagcttagattaaacgataccccttcgacacatacaatttacataagagaccctctggttctaggttatcagcccacgatccagagtttgtatcctatgtctcgggcgttttacacaaaagcccctgcactcctctatttttatgcgcgcagtccagaatcatagataaattcagaaattcaattagaaaatgatttttagtgttaaaataattccagaaatgtatttaattcatagaaaaccatcatagctccaaattaattcatttcagttcctataattttgtaatattattatttatcacttagtacaactattttaacaagaaagccatattaaactagatcacctaattaattttgtatcaagcacacgcggacttcagaaaatcataactaatttattttatctatgtttcaatc

SEQ ID NO: 528 - DNA, 792 bp, Zea mays
  source (0)...(0): Zea mays BAC clone full insert sequence contig bacm.pk010.m07.fis9
ttccctgaatactttgctgaatcaacttgactacaaaatctttggattagagacgattaaagaccaatatgttcatgatgctgattttaaggatgtgttgctgcattgtaaagatgggaaaggatggaacaaatatatcgttagtgatgggtttgtgtttagagctaacaagctatgcattccagctagctccgttcgtttgttgttgttacaggaagcacatggaggtggcttaatgggacattttggagcaaagaaaacggaggacatactggctggtcatttcttttggcccaagatgagaagagatgtggtgagattggttgctcgttgcacgacatgtcaaaaggcgaagtcacggttaaatccacacggtttgtatttgcctctacccgttcctagtgctccttgggaagatatttctatggattttgtgctgggattgcctaggactaggaagggacgtgatagtgtgtttgtggttgttgatagattttctaagatggcacatttcataccatgtcataaaactgacgatgctactcatattgctgatttgttctttcgtgaaattgttcgcttgcatggtgtgcccaacacaatcgtttctgatcgtgatgctaaatttcttagtcatttttggaggactttgtgggcaaaattggggactaagcttttattttctactacatgtcatcctcaaactgatggtcaaactgaagttgtgaataggactttgtctactatgttaagggcaggtctaaaggaagattataagatgtgggaggactg

SEQ ID NO: 529 - DNA, 753 bp, Zea mays
  source (0)...(0): Zea mays BAC clone full insert sequence contig bacm.pk010.m07.fis10
aggatcgataacatagatagggccttctcatgatatattttatattgctggcaagtacaacaacataggacaatttcttgtgcatagaatttctatttcatctagatatgttgtttcttcactttgtgcaaataaggtattggtatgttctcaagaagaaaagaatctcttgtttccatgtactttagttgaagtttcaggtttatatttgaaagacattaataaaagcttagtcatcaacatcaatcatgatgcaaaaccgaggacggtttgctatcaagaaggggagaatgatgagaacataacccacacagatatgaccatgttaatggctcctgctacaaagacattgaggaacaaagaagttgattggggaccaagtaatgatatttccaacatttccaacaaagcaagcacatcatcaaatttaaagatatacttgggtgaggagcatacactagagtcgaggacgactctattacaagaaggggaggatgatgaggacatcactgccatcaatacaccacaccagcgacctccttcaccatttaataatggaccagtgaaacgagtccgtgcacgtaaatttaattatcaggtgaactcgttccttgttgttgaagctaatcgttccttaaatgaggtactaataccttgtgattactttattattctaaggtgtttgggaggtgaaacatctagaatttgagaaggcaacaaggcattaaaagctgctccactttgagggatttc

SEQ ID NO: 530 - DNA, 629 bp, Zea mays
  source (0)...(0): Zea mays BAC clone full insert sequence contig bacm.pk010.m07.fis11bacm.pk010.m07.fis11
gctctcgctacttgcttgcaagcgcgcgtgctagttcagccgcccgtcttcttgtcttcggaaccccaccatattggagtttgatctttaaacctacatttagatctggtaatttagtacttgttctacttgttcttgctagttcttcgattgcttgcaggacgagtgccctagtggccagggtgtcacgctccacaagatcgtgacagccataggaggtggtgtatcggttgctaaggcgcagcgtctttggaaggctgtagtcgggccgtgaacgtcgtctcctcccccaatcgagttattccacaccctctcatcgaaagatcgggcaatcacccaacgggtgcacatcagttggtaatcagagcaaggtttatcggtgagagatttacttttcttcgctgttttcttatctcctatagtccagaaaaagccaaaaaatagtagattagttttaccgcaatcctataaaccattgagcatttactagtactacttagttagggcttgttgagtttttggttgcatcggttgtgtcgagttgctggtcttagtttattcctttagagttttgagttctaccacgttttggtcaccacgagatccaccatcaccaaaaacatctctgg

SEQ ID NO: 531 - DNA, 789 bp, Zea mays
  source (0)...(0): Zea mays BAC clone full insert sequence contig bacm.pk010.m07.fis12
cataaggaaacgattcgataaattcaacacacttagcatgtctacggttcagttttccttgactacgaatatgtttcaaagattcatgatcagaatgaataacaaactctttgggccacaaataatgctgccatgtttctaatgttcgcacaagagcatataattccttatcataagtagaataatttagaacagacccactcaatttttcactaaaatatgcaacaggtttgccttcttgtaacaaaacaccacccaatccaattccactagcatcacattcaagctcaaaagtcttattaaaatcaggaagttggaggagaggtgcatgtgtcaacttatctttcagcacgttgaaagcgtgctcttgtactttgccccaactaaaatgcactcccttcttcgtaagctcattcaaaggtgcagcaatggtgctaaagtccttcacaaaacggcgatagaagccagcaagtcctaggaaactccgcacctgtgtgatagtctttggcataggccatccatgtatcgcttctaccttggcttgatcaacctcaattccctgtggagtcacaacataaccaagaaacgaaactcgatcggtgcaaaatgtgcacttctcaaggttaccaaataaacgtgcatctcgtaaagcattaaaaacagcacgcatgtgatcaacatgttcatccatagatttgctgtagatcaatatatcatcaaagtatactaccacaaatttttcaatgaaggcacgcaaaacctcgttcattaatctcatgaaagtgctag

SEQ ID NO: 532 - DNA, 193 bp, Zea mays
  source (0)...(0): Zea mays BAC clone full insert sequence contig bacm.pk010.m07.fis13
ggtggtgtgtgcctgtagtcgcagctatatgaaaggttgaggtgggaggattgtttgagcctgaaaggcagaggttgcagtgagccgtggtcatgccactgtactccagactgggtgacagagcaagaccctgtctaaaaaaaaaaaaaagtgtgcttttcccaacacttagggaatcaaatccctggaactg

SEQ ID NO: 533 - DNA, 847 bp, Zea mays
  source (0)...(0): Zea mays BAC clone full insert sequence contig bacm.pk010.m07.fis14
gttccaaagtggtcaatgtgttgttggtaacaatttgtgttgtttctaattgaccaatgcgctcattggtgacttgaacatcttcgttgagggcatctgtgtgcaaccttacttgacgttcgaaatgttgtatgatgcccacggttcgtggagaatgtggaggtcgcgcatttgcatcctctgccatggttagtgcaaaagagatacaaaaacaagtaatgcagcctagtagttgctatgatgtggatggataaacactgcctcactaggaagaaatcaagctcttacaagttctcaccacgcaaagaaagtggcgctggcaaacagcaagaacaacaacagtggctgctagcacaacctggtggctgctagcacaacagtggctgctaaaactatagttccaaggaatagctagtaccacattagccacaacaagttgaataaacgttccacaatggtgttgtgctggtcctagtccaaaccataatagagacgcgagccgttacacaaatgatatcaccaaatactcaaaacagcaagctgacttagaaaattgtgaaacggtggcacacaaactgtctttgttttgttgcacatggaattttatctaccaatattcttactgtgatttttttctcttttttgtacgtgcttttttatcagcacgactttttttgtgcacttgccttttccttttccttgttttttttgaactacagctagagaacagctagagaactaaagatggagatctaaacaaggtggcacgaactcgaaactcttgcagcaagaactttgggaccagcactcgacacaaatgcagcaaccgtgaattcaacaagtcgaa

SEQ ID NO: 534 - DNA, 691 bp, Zea mays
  source (0)...(0): Zea mays BAC clone full insert sequence contig bacm.pk010.m07.fis15
ctgctacacccccattgtacacctggatcctctccttacgcctataaaaggaaggaccagggccctcttagagggggttggccgcgcggggacgaggacgagacaggcgctcgcttgaagccgctcgctccctctcccgcgtggacgcttgtaaccccctactgcaagcgcacccgacctgggcgcgggacgaacacggaggccgcgggattcccagctctctcacgccggtctccggccgcctcgatctccccccttcgcgctcgccctcgcgctcgacccatctgggctggggcacgcggcgacattcactcgtctgcccagggaccctccggtctcgaaacgccgacaatttgttatcatgtatgatcgactatgcattgtggttgctaattaatttaaaatctctctagttatctatgtgtgctattaaaattcatttaaattgtatttgcatattttgttaaaaattaaatattaattcatttaaattgtatttgcatatttctgttaaaaattaaaatattaattcatttaaattttattttcatatttctgttaaaaattaaaatattaatatggtaatcaaatcacaatcacagacggtttttcattagggtccgtttgtgaaaagaatagagcaccacaggcggtcctaaaaaaaccgcttgtgatactaatacatcacatg

SEQ ID NO: 535 - DNA, 951 bp, Zea mays
  source (0)...(0): Zea mays BAC clone full insert sequence contig bacm.pk010.m07.fis16
tatagtaggggttctatacaaaatatctaaataattacattatatgaagacaacgatccacctcaaccatagttgattgagaggcgacgacctagacctctcacgaactcatcgctgtatcattcatgctccttttcttgcggtacctattcctgacctggggggttgtgagtatagcaagagtgagctcacatacattcattgcattaataagttgtgggaaataatgtgcatgagatcacttatggtggggcccttgtgaagtgtaaggcttatcaacgaataagggttcaggctcagtattgcttttaataaattggtcaaaattttattagcatttactaagtataactagataccatcccattaagagaccacaattaataataaatcccataatgcaagtcaaacgacagattaaatttagtttcataaattaatcatgcaagagtcttgagtcattcttgactgtgagcacgacttatatactagttttacaccctgtagaggttgtgcatatttacccacaataagtgtttcccatttagcgatataggaatccctcgtccaaaaagctttacagacagtccgacctgaggacctccctatacctgcactcctccaccccggttgccccttttgggaaaggattaactcacactagctttcctaattagtcagccaagggtgttccattccacccttgtggtagcactgttatttcaagttaagctccatgttacaattaacacaatagtcttatcatgaaccataattaaaccaacaacaatagtggaacatgatcatagttcagtataacattaatcccaaaactaggtagagcaataacaagtctacccaattgttcatttgttttgcaggtgtggggtaaacaaaactagggtaacctattgggtcccaacaaattaaactgagcatgtcatagtgatt

SEQ ID NO: 536 - DNA, 800 bp, Zea mays
  source (0)...(0): Zea mays BAC clone full insert sequence contig bacm.pk010.m07.fis17
atcgttttacttaaacgggggaggcggtctcatggggcactttggcgtctacaagacacatgaggtgttggctgcccacttcttttggcctcggatgcgcgctgatgttgagcgccttgttgcacgctgcactacttgtcagaaagctaagtcacggttgaacaaccatggtttgtatatgcctttgcctgttcctacttccccttggattgatatttcgatggattttgttttgggattgcctagaactaagaaggggaggtgataaacccaacgggtagaagggtgcccgatctttcgatgagagatgatggaggtgaaaaacttgttggagaacgacgttggctgcccgactaccacaaccaagatggtgtggcgccttgagcgacaggtacactgtctcctgataactacgatttggggtggaggtcgacgttgtgctatccgactacaataaccacaagggtgctgcgccttagcgatagttacaccggctcctgttgttgctgctcttgccgtgccaagaacagccttgaacctgcaagcaatcgagaacaaggaagaacaagataaaaagcagacgctcacggatctgatagagttggggttctgtttcaagtatccgggtggtctagccgacacacgcgtttacaaggaagtagcaaaggctaaacttacatcaaacaaaaacccaagttctttggtggctgctagttgcttaaatagaggaatagaaaggagttctaatggagaacgaaactctctcggcagtttctggatgcctcgtttggttgctgtca

SEQ ID NO: 537 - DNA, 1317 bp, Zea mays
  source (0)...(0): Zea mays BAC clone full insert sequence contig bacm.pk010.m07.fis18
  misc_feature (1)...(1317): n = A,T,C or G
gtcattagggggatgacgaaccacacggcgtgcacgaccacgtcgatctccgtcgtcctgctcagtgtcaccgccgtagtcctgctccatctttgtggtcaacgcatcaaggcgtgccaggatggtgtcgagtgtggtgcgagtcgccgtttgagcaaggtcaagctggttgaaacactcggtcgtcgaagtgaccgttgaatcaagccgttcatgcatcgtcctaatgtcagcagcaagtccatcaacttgtccccttacttcctgcaactgggcatccaccgtgtcgtgtgctcctgccatagttagcgcaaacaccaaaaggagaaaaaaaccaacgacaaaaacaggggtgtactgcttacaaggcgctcacactagtgctgttatcaagttcttatccgttcttaccaagccacagtggtgaactgcaagcaacaggtggaaccggtgaaagattggatgagcgattgcgtggagaaacaganacctgctcgtcgtagaaatatgtggagttgtgggtaggctgcactcaagtcaaggattagcacgatcaaacaataatgcaaagttttattatagtgcaaaacacgaaactatattgctggccacaggtgcaaaggatggatggaactagcagaatggcagtaccgtaaatactgtactagtgatgccaaaaaaggcactagtagaaatcacaggtgattttgtttttcttttttgtatgatttttttgatatttttctcagcacaagaagcaacaagataggagctagacgaagtttcacctaaaacagagatcagatgtggtctacagaaaatcaggaagttctctgaaaagcgtgcgagaactttgacgaatttttttctttattttcctgaatttttttgacaattttgtcgaaaccaaacagaccgaaggtgagtttggccggcctcagaatggtgtcaaatagctcctgtaaaaatttcagattttttggacacccgagcgaaaagttatgcccggtttaaggaaggtacctcaagttatgttttcaaacgaccgggatgaaacaaccatatcctttctccttcgttgttttttgtttctattttttttgacgtaaccgaaggagaaaaacaaggaaacgatgttgactcggtttgtttttttttctgtttttttttcgtaaccgaaggagaaaaacaaggaaacggccgttgactcggtttgttttttctgttttttttacgtaaccgaaggagaaaaacaaggaaacgatgttgacttagtttgtggagtgatcaaaggggagatggtggcggcgctagcct

SEQ ID NO: 538 - DNA, 978 bp, Zea mays
  source (0)...(0): Zea mays BAC clone full insert sequence contig bacm.pk010.m07.fis19
gcaaccgcgaggcgacggatcttaaccttgatcccctctctatttattcaggagctacgcctcctttattttgggagttttgttttacgttagccttagctactctcgaacacgcgcaaatctgcgctgtcttcgtgtattcagaactccaccctcgagtaatagattagattgctcgcatctttttcttgttcgttcttcgattgcgcacaggaaacgatcttcgtgatcaggccgatctcgcatcagcaaggtcggtaaccacagggagttggttcagcgattgcattggcgcctcgggcttgctcgtcgtagtcggatcgcaagggtcatcttccgccaaatcggaattatctctactcgccgaaagatcgggcacctcagctacatcagggcccgtgcaagagaattgaactacatcatgctgttaaagaacgaaggcccggaagaatagacgaccagcccaactgcggcccataatggacgacctagggttggccgcccctaggggctgctccccctctctatttatccaggagctgcgcctcctttatttttcgagttttgttttagatctagctttagctaccctagaacacgcacaaatacgtgctgtcctctgtgattcagaactccacctcgagtgatattaagattgctcgcatctttttcttgttcgttcttcgattgcgcacaggaaacgatcttcgtgatcaggccaatctcgtagcagcaaggtcggtaaccattaggagttggttcagcgattgcattggcgcttcgggatcgctcgtcgtagtcggatcgtgagggtctacttccaccaaatcggaattatctccactcaccgaaagatcgggcactccagctctatcagaacttgcccaatcccatactttaggtccaaaacacatgtttggggtggtttcgcacaatttcgttgccgcacgtcacccattctgaaatgggtgtcggggt

SEQ ID NO: 539 - DNA, 1130 bp, Zea mays
  source (0)...(0): Zea mays BAC clone full insert sequence contig bacm.pk010.m07.fis20
gtagtgtggatgtcttcatcagttttttttcctacagtccacaaaaccacataaaaattcaggttagaccttatcccagcaccattttgagcctcgcactttctttcaataatctgcattgttgaatttgtgtgctttcgcgtcatttattgctggttgcattgtgttcttccaccattcaaaccctagcgccgccaccatctcccgtttgatcacgccacaaaccgagtcaacatcgtttccttgtttttctccttcggttacgtaaaaaaaacagaaaaaacaaaccgagtcaacggacgtttccttatttttctccttcggttacgaaaaaaaacagaaaaaaaaacaaaccgagtcaatagccgcctccttgtttttctccttcggttacataaaaaaaacagaaaaaaagaaaacgaaggagaaaggatactgttgtctcatcccggtcgttttaaaacataacttgaggtaccttccttaaaccgggcataacttttcgctcgggtgtccaaaaaatctgaaatttttacaggaggttgttgacaccattctaaggccggccaaactcaccttcggtctgtttggtttcgacaaaattgtcaaaaagttcgggaaaataaagaaaaaaattcgtcaaagttctcgcacgcttttcagagaacttcctgattttctatagaccacatctgatctctgttttaggtgaaacttcgtgtagctcctattttgttgctccttgtgctgagaaaaatatcaaaaaaatcatacaaaaaagaaaaacaaaatcacttgtgattcctactagtggcctcgctagtacaatatttacggtactgccattctgctagttccatccgtccttcgcacttgtgtccagcaatatagtttcgtgttctgcactataattcaactttgcattattgtttgattgtgctaatcattgacttgagtgcagcctacccaaaactctacatatttctacgacgagaaggtttctgtttctccaggcaatcgctcatccaatctttcaccagttccacctgttggttgcagttcaccactgtggcttggtaagaacggataagaacttgataacagcactagtgtgagcgccttgtgagcag

SEQ ID NO: 540 - DNA, 1418 bp, Zea mays
  source (0)...(0): Zea mays BAC clone full insert sequence contig bacm.pk010.m07.fis21
  misc_feature (1)...(1418): n = A,T,C or G
atcgttaccttgattgggctaaccatggcaggattggaggttgatgatgcttctcgtaatatgccacactctcctcgcaccaagggtatcatacaacactttgtaaggctggtgaagacgcacacggaaggtcttgataatgacatgcaggtgacgaatgaaaagatggggcaattggaggccacacagatcgacacaaacaccaaacttgcaaatgtggaaatggcagttgctcatattgacaagagccttgtcgcactcttgaggcggtttgatgagatgcatgctaatatcaatggtgggcgtgatgagggcgccgaaggtaactgggatgactatgttgctgatactgaacaagatgaccaagaagcacctaatcgccggcgactacgtactaaccgtagaggtatgggtggttttcgccgacgtgaggtacatggtaatgatgatgcttttagtaaggttaaatttaaaatacctccttttgatggtaaatatgaccctgatgcttacattacttgggagattgcggttgatcaaaagtttgcatgccatgaatttcctgagaatgcgcgggttagagctgctactagtgagtttactgattttgcttctgtttggtggatagaacatggtaagaagaatcctaataacatgccacaaacttgggatgcgttgaaacgggtcatgcgggctagatttgttccttcttattatgcacgtgatatgttaaacaagttgcaacaattgagacagggtactaaaagtgtagaagaatattatcaggaattacaaatgggtatgctgcgttgtaacatagaggagtgtgaggaatctgctatggctagatttttgggcgggttaaatagggaaattcaggacatccttgcttataaagattatgctaatgtaacccgattgtttcatcttgcttgcaaagctgaaagggaagtgcagggacgacgtgctagtgcaaggtctaatgtttctgcaggaaaatctacaccatggcaacagcgcacgactacgtccatgaccggccatacaccagcaccaactccctcgccaagtcgaccagcacccccgccttcctccggcgacaaaccacgtgcatcttccacaaattcagcaaccaaatctgcccagaaaccagcaggtagtgcctcttcagtagcctccacgggtagaacaagagatgttctgtgttatcgatgcaagggctatggacacgtgcagcgtgattgtcctaatcagcgtgttttggtggtaaaagacgatggtgggtattcctctgctagtgatttggatgaagctacacttgctttgcttgcggctgatgatgcaggcactaaggaaccacccgaagaacagattggtatcaaggtatacngataccgtcgacctcccgttgtagttga

SEQ ID NO: 541 - DNA, 1378 bp, Zea mays
  source (0)...(0): Zea mays BAC clone full insert sequence contig bacm.pk010.m07.fis22
  misc_feature (1)...(1378): n = A,T,C or G
tttgcttaatacttgctgatcttcttgtgatcttcataatgtcttcttttgaggtgttgctttcctcattgccttagtccaagtcactttagcatcctctgaactacaatcataaacactagcaaacacgttagtccacatattatgttgatcatcaaacaccaaaacctattgagccaaatggcccggggtcccttttccttacaacgcagaaattgtactgggccaacacgctggaaaacgaattttcctatcgcgtatacctctgtgtccctccaatgaagagatgttccctttctagttcaaaagaaagcagtttcctatacggcttagctttgcaatgatggttaacaaagcacagggacagactattcctaatgttggcgtgtacttgcctgaagcagtgttctctcatggccaactatatgttgctctatctagagcgacaaccgattgaacataaagatccttgccatcccagccgtcgatgtgaagaagaggtcgaggaagggtgtaagaaagaaccccacattagattgtgggacatgcaccaagaacgtcgtctacaagaaggtactaacaaactagacccatggtaagtctgtcaaaacacaaacatataggagtactgcgtgtgattgcatcaagaataaataaagtttgttaaattatatttgtgattgttttggtgtctaaacaattgacacatagggtaatagcagtaagtcatgatatgtgtctggctgtaaggatatggttttgcattagaagtgtagacgatgggtggatcgagttcatggatgagcgctcctttggtcctttgttacatgttatatattaccttcattgcagtcttatcaccttcattgcagtcttactgcatggttttggtgtaccaaaattcttgttattctcgtcgtgttcggagagcacggcactaactgtctaccacttnagaacnnngagctnatggttgccccggcttatcgctgtgaccactgtgccatctaaagaaacacatcatagttattattggttctcaggaaccctgaacattttgtttctgtttacaagaaaggatgagtagttcactatgccatttgcactgaatgttttgttataattggcgcaaactagtctccgtgttttgggatatttccaagaagttcctgctatatattaataatgtattcgccaaaatctggtccttgaccgacattgcccctaacaagactggcaaaatatgggaaattcggtagacttgtggatttggtttcttcggcgtaaggtgcattaactacaatggatttaaaaggtttctaaaaaacccatagggcgtcttattgtggaaaggttattaaccactttttagggtgga

SEQ ID NO: 542 - DNA, 786 bp, Zea mays
  source (0)...(0): Zea mays BAC clone full insert sequence contig bacm.pk010.m07.fis23
cagatttgttcgtgattttagctccattgcagcgcctctacatgagcttacaaagaaagatgtgctgtttgcttggagtgattcgcaggaggtagcgttcagcactttgaaagataagttaacccaagttcccctcttgcaattgcctgattttaataaagtttttgagcttgaatgcgatgctagcggtattgggctaggtgctgttttgttacaagaaggaaaaccagttgcttattttagtgaaaaattaagcggtgctagtctgaaatattctacttatgataaggagctttacgctttagtgcgcactttgcatacatggcagcactatctttggcatcgtgagttcataattcattctgatcatgaggctttaaaacatattcgtacccaaacaaatctgaaccgtcgtcatgctaaatgggtcgaattcattgagtcctttccttacattattaaacacaagaacgggaaggacaatgatattgctgatgctttgtctcgtcgctataccttgctgtcacaattagattttaaaatctttggtttggacactgtaaaggatcaatatattgacgatgctgattttaaagatgctttcggccattgtattaatgggataccatggggcaaatttcacatacaggatgggttcctgtttcgcactaacaagctgtgtgttccagctagttcggttcgtcttttgttgttacaggaggcgcatggaggcggtctcatggggcattttggcgtctacaaaacgcatgaggtgttggctgccca

SEQ ID NO: 543 - DNA, 1457 bp, Zea mays
  source (0)...(0): Zea mays BAC clone full insert sequence contig bacm.pk010.m07.fis24
taaattacacacggcgaggtcgacggtatcgtttcccttgattcctcgactcaaacgtgtcattctctcccaagtatggtgttaaatctgcaatattaaaagaggaactgaccccaaaatctgcaggcaactgaactttatatgcattatcattatttttgtgaagtactttgatgggtctagcagctcttggttgtaatttagatttgcgcatatcagggaatctatctgatgtagctgaggtgcccgatcttttggcgagtagagataattccgatttggcggaagatgacccttgcgatccgactacgacgagcaagcccgaggcgccaatgcaatcgctgaaccaactctctgtggttaccgaccttgctgatgcgagatcgacctgatcacgaagatcgtttcctgtgcgcaatcgaagaacgaacaagaaaaatatgcgagcaatctaatctattactcgagggtggagttctgaatacacgaagacaacgcagatttgcacgtgttcgagagtagctaaggctaacgtaaaacaaaactcgaaaataaaggaggcgcagctcctggataaatagagggggcgcagcccctaggggcggccaaccctaggtcgtccactatgggccgcagttgggctggtcgtctattcttctgggccctcattcttcagtagcatgacgaagttaagatctctggcacgggcccgagtgattggcccagcttatgaaggaagtggcgcttgatgtggaggtgctgctggtgtagtcgtactcatagtgatgtcctcatcatcctccccttcttgaagtgaagtcgtcctcgacgacaactcctcatcctcggccatataaggtttcaaatctgcaacattaaaactagtggaaacaccaaattccgcaggcaggtcaaggatataagcattatcattaatctttgttagcaccttaaaaggaccagcagcacgaggccttaatttagaacggcgcaaagtaggaaaccgatcctttctcaagtgcaaccgaaccatatcacctggctcaaaagtaacatgttttcttcctttactaccagcaacctgattttttgcattagtagcagcaatgttctgtttcgtttgttcatgtatggtaatcatttgttcaacatgtgcagcagcatctacatgtggggcgttcgcagcattaagtgaaatcaaatcaataggtgccctagggatgtaacaataaacaatctgtaaagggcacatctttgtagaagaatgcgtggcatgattgtaagcaaattcaacatgaggcaagcaatcctcccaacgtctcaaattcttgtctaaaacagccctaagcatggtagataaagttctatttactacctcagtttgtccatcagtctgaggatgacaagtagtgctaaacaacaatttagttcccaatttattccaaagagatctccaa

SEQ ID NO: 544 - DNA, 1265 bp, Zea mays
  source (0)...(0): Zea mays BAC clone full insert sequence contig bacm.pk010.m07.fis25
  misc_feature (1)...(1265): n = A,T,C or G
tcaagaaataaaggaggcgcagctcctggataaatagagaggtggcgcagcccctaggggcggccaaccctaggtcatccattatgggccgcagttgggctggtcgtctattcttccgggccttcgttctttaacagcataatgtagttcaattctcttgcacgggcccgagtcactggcccaggtggaaggggtggcgcctggactggggaagatggtgcctgggctggagaaggtgctgctggtgtagatgtgctcgtgttggtgttgatgtcctcatcatcctccccttcttgaactgaagtcgtcctcgacggcaactccttgtcttctcccgcatacggtttcaaatctgcaacattaaaactagtggaaacaccaaactccgcaggcaggtcgagggtataagcattatcattaatcttggttagtatcttaaaaggaccagcagcacgaggcatcaatttagaacgacgcanagtagganaacgatcctttctcaaatgcaccnaaaccatatcaccaggttgaaaagtaactagtttccggcctttactaccagtaatctgatatttagcattagcagcagcaatgttttgttgagtttgttcatggagattaatcatttgttcaacatgtgcaagagcatctatgtgtggggcgtccgcagcatcaagtgaaaacaaagcaataggcgccctaggaatgtaaccataaacaatttgaaaagggcacatctttgtagaagaatgggttgcatgattataagcaaactcaacatgagggcatccaccgtgtcgtgtgctcctgccatagttagcgcaaacaccaaaacacgaaaaggagaaaaaccaacgacaacagggaaatggtggtgacaactcgctcaatggaatgatgttatcaagttcttatccgttcttaccaagccacagtggtgatttgcaaccaacaggtgtaaccggtgaaagattggatgagcgattgcctggagaaacagaatccttctcgtcgtagaaatatgtggagttttgggtaggctgcactcaagtcaaagattagcacgatcaaacaataatgcaaagttgaattatagtgcaaaacacgaaactatattgctgggcacaagtgcaaaggacagatggaactagcagaatggcagtaccgtaaatattatactagcgaggccaaaaatgcactagtacaaatcaggtaatcgatnctncgcctgcatgtgntgacggtcccacattcgccgtatagta

SEQ ID NO: 545 - DNA, 654 bp, Zea mays
  source (0)...(0): Zea mays BAC clone full insert sequence contig bacm.pk010.m07.fis26
gtttaatcatgtgagtgtccgagccgttcatgaccgtgagcacggttgtcacaccccgggctttaagggacaaagccgggtgcatctcatacatgcgtcaaagaagacaacatatataataacagagtgtatagagataaatgtcacaataatcagagtacttattacatagcggaagacttacaaaaatataagataaatataacaggatctaaaatctatccttagcgccagaaagccaactgggagacaccacctagatcgaatcgaactcctcgttgtgtggcttctcttgaaccacctgttcttctcctgtgggggtgtgagacagcaagggtgagctcacacatgttcattgctcaacaagttgtggggaataatgtgtatgaactcaccaaaggtgggagttcatgtgatgtgtaaggctgatcaacaataggggttaaagttaagcattgcttttaataagttagtcaaaattttattagcagttactaaatgtaagtaaataccaaaccataataaataatagaacaaaattaataaataatctcatccaagtgcaaaatgacaaattgagttttaattccatagattactcatgtgagtgtccgagctgctcatgaccgtgagcacggctagtataccagtttt

SEQ ID NO: 546 - DNA, 1489 bp, Zea mays
  source (0)...(0): Zea mays BAC clone full insert sequence contig bacm.pk010.m07.fis27
  misc_feature (1)...(1489): n = A,T,C or G
attgacttgggtagtgcaggcgttaactcggcagtttctggacacttagtgtctgatctctcgttgattcttgatccactagaaagtagacaaagagacctttccaacaagtgcttatttgcattaaacaaccttgggagctgaaagatatgccctcttaaacttgcacttgttgtagtttcgaaatcccctcaagtggagcagcttttattgccttgttgccttctcaaattctagatggttcacctcccaaacaccttagaataataaagtaatcacaaggtattagtacctcatttaaggaacgattagcttcaacaacaaggaacgagttcacctgataattaaatttacgtgcacggactcgtttcactggtccattattaaatggtgaaggaggtcgctggtgtggtgtattgatggcagtgatgtcctcatcaggagggatagcatttttgtggttgttgatcgattctccaaaatggctcatttcatactttgtcataagaccgatgatgctagcaatgttgctgaattgtttttagagagattattcgtttgcacggtattcccaatacaatagtctcggatcgtgatgctaagtttcttagtcatttttggagatctctgtggaataaattgngaactaaattgctatttagcaccacttgtcaccctcagactgatggtcaaactgaggtagttaatcgaactttgtctaccatgcttagggctgttttagacaaaaatttgaaacgttgggaggattgcttacctcatgttgagtttgcttataatcatgcaacacattcttctacaaagatgtgcccttttcaaattgtttatggttacattcctagggcgcctattgctttgttttcgcttgatgctgcggacgccccacacatagatgctcttgcacatgttgaacaaatgattaatctccatgaacaaactcaacaaaacattgctgctgctaatgctaaatatcagattactggtagtaaaggccggaaactagttacttttgaacctggtgatatggtttggttgcatttgagaaaggatcgttttcctgctttgcgccgttctaaattgatgcctcgtgctgctggtccttttaaggtactaaccaagattaatgataatgcttatatccttgacctgcctgcggagtttggtgtttccactagttttaatgttgcagatttgaaaccgtatgcgggagaagatgaggagttgccgtcgaggacgacttcagttcaagatggggaggatgatgcggacatcaacaccaacacgagcacatctacaccagcagcaccttctccagcccaggcgccaccccttccacctgggccagtgactcgggcccgtgcaagagaattgaactacatcatgttgttaaagaacgaaggcccggaagaatagacgaccagcccaattgcggcccataatggacgaccttgggttgccgnccccctagggg

SEQ ID NO: 547 - DNA, 1298 bp, Zea mays
  source (0)...(0): Zea mays BAC clone full insert sequence contig bacm.pk010.m07.fis28
  misc_feature (1)...(1298): n = A,T,C or G
gcacatggaggcggtctcatggggcactttggcgtctacaagacacatgaggtgttggctgcccacttcttttggcctcagatgcgcgctgatgttgagcgccttgttgcacggtgcactacttgtcagaaagctaagtcacggttgaacaaccatagtttgtatatgcctttgcctgttcctacttccccttggattgatatttcgatggattttgttttgggattgcctagaactaagaaggggagggatagcatttttgtggttgttgatcgattctccaaaatggctcattttataccttgtcataagactgatgatgctagcaatgttgctgaattgttttttagagagattattcgtttgcacggtattcccaatacaatagtctcggatcgtgatgctaagtttctgagtcatttttggagatctctgtggaataaattgggaactaaattgctgtttagcaccacttgtcaccctcagactgatggtcaaactgaggtagttaatcgaactttgtctaccatgcttagggttgttttagacaaaaatttgaaacgttgggaggattgcttgcctcatgttgagtttgcttataatcatgcaacacattcttctacaaagatgtgcccttttcaaattgtttatggttacattcctagggcgcctattgctttgttttcgcttgatgctgcggacgccccacacatagatgctcttgcacatgttgaacaaatgattaacctccatgaacaaactcaacaaaacattgttgctgctaatgctaaatatcagattattggtagtaaaggccagaaactagttacttttgaacctggtgatatggtttggttgcatttgagaaaggatcgttttcctactntgcgccgttctaaattgatgcctcgtgttgctggtccttttaagatactaaccaagattaatgctaatgcttatatccttgacctacctgcgaagtttggtgtttccactaattttaatgttgcagatttgaaaccgtatgcgggagaagatgaggagttgccgtcgaggacgacttcagttcaagaaggggaggatgaggaggacatcaacaccaacatgagtacatctacaccagcagcaccttctccagcccaggcaccatcttccctagtccaggcgccacccttccacttgggccagtgactcaggctcgtgcaagagaattgaactacatcatgttgttaaagaacgaaggcccagaagattagaagatggtccaataggaaggcccggatggggcgcctaggtaa

SEQ ID NO: 548 - DNA, 734 bp, Zea mays
  source (0)...(0): Zea mays BAC clone full insert sequence contig bacm.pk010.m07.fis29
cagtgtcaccgccgtattcctgctccatctttgtggtcaatgcatcaaggcgtgccaggatggtgtcgagtgtggtgcgagtcgccgtttgagcaaggtcaagttggttgaaacgctcggtcgtcgaagtgatcgttgaatcaagccgttcatgcatcgtcctaatgtcagcagcaagtccatcaacttgtccccttacttcctgcaactgggcatccaccatgtcgtgtgctcctgccatagttagcgcaaacaccaaaaggagaaaaaccaacgacaaaaacaggggtgtactgctcacaaggcgctcacactagtgctgttatcaagttcttatccgttcttaccaagccacagtggtgaactgcaatcaacaggtggaaccggtgaaagattggatgagcgattgcgtggagaaacagaaacctgctcgtcgtagaaatatgtggagttgtgggtaggctgcactcaagtcaaggattagcacgatcaaacaataatgcaaagttgaattatagtgcaaaacacgaaactatattgctggccacaggtgcaaaggatggatggatggaaatagcagaatggcagtaacgtaaatattgtactagtgatgccaaaaaggcactagtagaaatcacaggtgattttgtttttcttttttgtatgatttttttgatatttttctcagcacaagaagcaacaagataggagctacacgaagtttcacctaaaac

SEQ ID NO: 549 - DNA, 1465 bp, Zea mays
  source (0)...(0): Zea mays BAC clone full insert sequence contig bacm.pk010.m07.fis30
catctacatgtggggcgttcgcagcattaagtgaaatcaaatcaataggtgccctaggaatgtaaccataaacaatctggaaagggcacatctttgtagaagaatgcgtggcatgattgtaagcaaattcaacatgaggtaagcaatcctcccaacgtctcaaattcttgtctaaaacagccctaagcatggtagataaagttctatttactacctcagtttgtccatcagtctgagggtgacaagtagtgctaaacaacaatttagttcccaatttattccaaagagatctccaaaaatggcttagaaacttagcatcgcgatcagagactattgtttttggaataccatgtaaacgaataatttctctaaagaacaattcagcaacaatgctagcatcatcagttttatgacaaggtataaagtgagccattttagagaatctatcaacaaccacaaaaatactatccctccccttcttagttctaggcaagcccaaaacaaagtccatagaaatatcaagccaaggagaagaagggacaggcaaaggcatatacaaaccatggttgttcaaccgtgacttagctttctgacaagtagtgcagcgtgcaacaaggcgctcaacatcagcgcgcatccgaggccaaaagaagtgggcagccaacacctcatgcgttttgtagacgccaaaatgccccatgagaccgcctccatgcgcctcctgtaacaacaaaagacgaaccgaactagctggaacacacagcttgttagcgcgaaacaggaacccatcctgtatgtgaaatttgccccatggtatcccattaatacaatggccgaaagcatctttaaaatcagcatcgtcaacatattgatccttcacagtgtccaaaccaaagattttaaaatctaattgtgacagcatggtatagcgacgagacaaagcatcagcaataacattgtccttcccgttcttgtgtttaataatgtaaggaaaggactcaatgaattcgacccatttagcatgacgacggttcagatttgtttgggtacgaatatgttttaaagcctcatgatcagaatgaattatgaactcacgatgccaaagatagtgctgccatgtatgcaaagtgcgcactaaagcgtaaagctccttatcataagtagaatatttcagactagcaccgcttaatttttcactaaaataagcaactggttttccttcttgtaacaaaacagcacctagcccaataccgctagcatcgcattcaagctcaaaaactttattaaaatcaggcaattgcaagaggggagcttgggttaacttatctttcaaagtggtgaacgctacctcctgcgaatcactccaagcaaacggcacatctttctttgtaagctcatgtagaggcgctgcaatggagctaaaatcacgaacaaatctgcggtagaaaccagcaagatcaggaaa

SEQ ID NO: 550 - DNA, 1519 bp, Zea mays
  source (0)...(0): Zea mays BAC clone full insert sequence contig bacm.pk010.m07.fis32
acgctgctatggcgcgttttcgtggtggtttgaacagagaaatcagggatatacttgattataaggattattttgatataaccacattgtttgaatatgcttgcaaagctgaacgtgaagtgcagggacgacgatcaaagacatatactaactcttttgcaggtcagggtccaacacacagctcaactccttccagccctgcaccttctacgcctagcactacatcgcgcatagggacgaccaagccagtggcgccccctgcaaaaggcgccgcttcttccacaggatgtacacgggatattcagtgccatcgttgcagagggtttgggcacatgatttgggactgcccaaacaagcgtaccttgcttatacatgacaatggtgagtactcttcagccagtgattctgaggaaactagtcatgctatgattgccactaaccatgcagcaaatgaggaagtccacgttgatcccatcgacgccgataggtatgagagtcttgttgtgcagcgtgttctcagcacacaggttgcccaggccgaaaaaaatcagcgacacactctattccataccaagggcgtcgtgcacgaacggtcgattcgcatcatcatcgatagtggcagctgcaacaatttggcaagtacaacgttggtagagaaattatccttgcccactcgcacacatccacatccgtatcacattcaatggcttaatgatggtggtaaaataaaggtaacacgttcggtacgtgtccccttttcgctgggttcttattctgattatgctgattgcgatgttattcctatggaagcatgctctttgttattaggtcgaccttggcaatatgatactgatagtttacatcatggtcgttcaaatcattattctttcatgtttaaaggccagaaaataattataaatcccatgacccctgaccaaattttgaaagatgatcttactagggctgctaaaactgcacaacaagtcaaatcgacatcagccgcacctattaaatctgaaatcaagttgcactctcctgttttacttgctacacgtgctgattttgatgatctccatgaagctcatatgccctgttatgcacttgtatgctcgcgaatgcttgttccgcttgttgatgcaccgtctttggatataccccctgctgttgttaaccttttgcaggagtatgctgatgtttatcctacggacttaccaccgggtcttcctcccctccgtggcattgagcatcagatcgatctcatccctggcgcttctcttccgaaccgcgccccgtaccgtacaaatccagatgagacgaaggagatccagcgccaggtgcagacgctgcttgataagggttacattcgtgagtctcttagcccttgctcggttcctgttttactcgtcccaaagaaagatgggtcatggcgtatgtgcgtagattgtcgtgctattaataacatcacagttcgttatcgatatcctattccacgccttgatgatatgctagatgagcttag

SEQ ID NO: 551 - DNA, 1746 bp, Zea mays
  source (0)...(0): Zea mays BAC clone full insert sequence contig bacm.pk010.m07.fis33
ctgggacatctatgccaatacaagtaccaatttctggtcccattactcgtgctcgtgctcgtcaactcaaccatcaggtgattacactcttgagttcatgtccatcatatttagaccatggagacccttgcactcttgttttgcttaggaaccagggagaagaccgaaatggaaaaggatttgaacatgctggattcggactgcagaagaacaccaacttgtgacggtcaccacggtcagatgcgggctcggattggaatgttcaagcacaacatggaaagcttatcaagtctactttcatatggatccggaattatagtcatatctgttctgaggccgccgtaatcattgttttcttaccgagacatttcctgccttttctgcccatggtgctgcgtcaccctattttggcccaatgggtcgtgtatcaagttaggtccattagggacgcatcctagggttgcagcacgaccccaatacccttgtggtcgtcctcccatgtttataaaccccctagccgccaccaagaacagcgggttttgtttagatcaagtttagctctcgctacttgcttgtaagcgcgcgtgctggttcagccgcccgtcttcttgtcttcggaaccccaccatattggagtttgattttgaaacctacatttagatctggtaattcagtacttgttctacttgttcttgctagttcttcgattgcttgcaggacgagtgccctagtggccagggtgtcacgctccacaagatcgtgacaaccataggaggtggtgtatcggttgctaaggcgcagcgtctttggaaggctgtagtcgggccgtgaacgtcgtctccttccccaatcgagttattccacaccctctcatcgaaagatcgggcaatcacccaacgggtgcacatcagttggtatcaaagcaaggtttatcggtgagagatttacttttcttcgctgttttcttatctcctatagtccagaaaaagccaaaaaaatagtagattagttttaccgcaatcctataaaccattgagcatttactagtactacttagttagggcttgttgagtttttggttgcatcggttgtgtcgagttgctggtcttagtttattcctttagagttttgagttctaccacgttttggtcaccacgagatccaccatcaccaaaaacatctctggttcgtttttgccaccacggatacatatcatatccgatttggaagtttaaatacaatctagaaagcttatcttatcttctttccaacggatctgaccttatctcaaaattcgttctgagcgctccgcaatcatcgtagagatttctggactttctatattaacaagatttgttaaatctgatttaaaggggctgttagcaatatctttattgtttgggttgtcatagtgaaaaaagggtttaagcccctgcaaaaaaaaaacagaagaagaagaaggaaaaaaaagaatagaaaaaaaaggaaaagaagaagaagggggctgaatctctaaatctgttgtttctctttgtgctgtgctagttgttctttttcagtgactacctttgtgcctaggctcacgtctctaacctggtttagcctaggaccagcacagtaccaccgttgaacgattattcagcttgcttttgtaactaacgtggtactagtgtattccttgcttcagcccacctacaactctacatatttcgactacagtttgacaggtcgtgttgctgcggcacc

SEQ ID NO: 552 - DNA, 1789 bp, Zea mays
  source (0)...(0): Zea mays BAC clone full insert sequence contig bacm.pk010.m07.fis34
  misc_feature (1)...(1789): n = A,T,C or G
tcaaatcacaaggggaggtcgacggtatcgatttgcctgatgttatcttttttttctgtttttttgacgtaaccgaaggagaaaaacaaggaagcgatgttgactcggtttgtggcgtgatcaaaagggagatggtggcggcgctagggtttgaatggtggaagaacacaatgcaaccagcaacaaatgacgcgaaagcacacaaattcaacaatgcagattattgaaagaaagtgcgaggctcaaaagggtgctgggataagatctaacctgaatttttatgtggttttgtggactgtaggaaaaaaaacgctcgataaactcaccgatcaacctggaaatctgataccaattgatgaagctgaagtgcccgatctttcggcgagtagagataattccgatttggcggaagatgacccttgcgatccgactacgacgagcaagcccgaggcgccaatgcaatcgctgaaccaactccctgtggttaccgaccttgctgatgcgagatcggcctgatcacgaagatcgtttcctgtgcgcaatcgaagaacgaacaagaacaagatgcgagcaatctaatctattactcgagggtggagttctgaatacacgaagacagcgcagatttgcgcgtgttcgagagtagctaaggctaacgtaaaacaaaactccgaaataaaggaggcgcagctcctgaataaatagagagggggcgcagcccctaggggcggccaaccctaggtcgtccattatgggccgcaattgggctggtcgtctattcttccgggccttcgttctttaacaacatgatgtagttcaattctcttgcacgggcccgagtcactggcccaggtggaaggggtggcgcctgggctggagaaggtgctgctggtgtagatgtgctcgtgttggtgttgatgtccgcatcagtagagataattccgatttggcggaagatgacccttgcgatccgactacgacgagcaagcccgaggcgccaatgtaatcgctgaaccaactccctgtggttaccgaccttgctgatgcgagatcgacctgatcacgaagatcgtttcctgtgcgcaatcgaagaacgaacaagaaaaatatgcgagcaatctaatctattactcgagggtggagttctgaatacacgaagacaacgcagatttgcacgtgttcgagagtagctaaggctaacgtaaaacaaaactcgaaaataaaggaggcgcagctcctggataaatagagggggcgcagcccctaggggcggccaaccctaggtcgtccactatgggccgcagttgggctggtcgtctattcttctgggccctcattcttcagtagcatgacgaagttaagatctctggcacgggcccgagtgattggcccagcttatgaaggaagtggcgcttgatgtggaggtgctgctggtgtagtcgtactcatagtgatgtcctcatcactatctttccttaaatgcacccatactaaatcaccaggttcaaaggtaatatgctgtctacccttgctacctgcttcttcatacttagcattcatggctttaatatttgctttagtttgttcatgcagctttataatcagctcagcacgacgagaagcatcaaaattcgttatttcagaatgtgggatggcgataagatcaataggagcacgagggacaaaaccatacacaattttaaaagggcatagtttagttgtagaatgctgagaacgccccttttttgtaatcgatnccgtcgacntgcaggggtaanncgggccccct

SEQ ID NO: 553 - DNA, 2562 bp, Zea mays
  source (0)...(0): Zea mays BAC clone full insert sequence contig bacm.pk010.m07.fis35
gcgccacagatttgttccttcttattatgctcgtgatttgcttaacaaaatgcagcgttttcaacaaggttcacagtctgttgaggaatattaccaggagttacaaaagggtatgcttcgttgtggtttggttgagtcggatgacgctgctatggcgcgttttcgtggtggtttgaacagggaaattcaggatatacttgattataaggattattttgatataaccacattgtttgaatatgcttgcaaagctgaacgtgaagtgcagggacgacgatcaaagacatatactaactcttttgcaggccggggtccaacacacagctcaactccttccagccctgtaccttctacgcctagcactacatcgcgcacagggacgaccaagccagtggcaccccctgccaaaggcgccgcttcttccacaggacgtacatgggatattcagtgccatcgttgcagagggtttgggcatatgattcgggactgcccaaacaagcgtaccttgcttatacgtgacaatggtgagtactcttcagctagtgattctgaggaaactagtcatgctatgattgccactaaccatgcagcaaatgaggaagtccacgttgatcccatcgacgccgataggtatgagagtcttgttgtgcagcgtgttctcagcacacaggttgcccaggccgaaaaaaatcagcgacacactctattccataccaagggcgtcgtgcacgaacggtcgattcgcatcatcatcgatagtggcagctgcaacaatttggcaagtacagcgttggtagagaaattatccttgcccactcgcacacatccacatccgtatcacattcaatggcttaatgatggtggtaaaataaaggtaacacgttcggtacgtgtccccttttcgctgggttcttattctgattatgctgattgcgatgttattcctatggaagcatgctctttgttattgggtcgaccttggcaatatgatactgatagtttacatcatggtcgttcaaatcattattctttcatgtttaaaggccagaaaataattatacatccaatgacccctgaccaaattttgaaagatgatcttactagggctgctaaaactgcacaacaagtcaaatcgacatcagccgcacctactaaatctgaaatcaagttgcactctcatgttttacttgctacacgtgctgattttgatgatctccatgaagctcatatgccctgttatgcacttgtatgctcgcgcatgcttgttccgcttgatgatgcaccgtctttggatataccccctgctgttgttaaccttttgcaggagtatgctgatgtttatcctacggacttaccaccgggtcttcctcccctccgtggcattgagcatcagatcgatctcatccccggcgcttctcttccgaaccgcgccccgtaccgtacaaatccagaggagacgaaggagatccagcgccaggtgcagacgctgcttgataagggttacattcgtgagtctcttagcccttgctcggttcctgttttactcgtcccaaagaaagatgggtcatggcgtatgtgcgtagattgtcgtgctattaataacatcacagttcgttatcgatatcctattccacgccttgatgatatgctagatgagcttagtggtgccgttattttctctaaggttgatttgcgtagcggttaccatcagattagaatgaaactcggtgatgaatggaaaacggcttttaaaacgaaatttggtttatatgaatggttggttatgccatttggattgactaatgctcccagcaccttttatgcgtttaatgaacgaagttctacgggccttcataggtttgtttgttgttgtttatttcgatgatatccttatttacagcaagtctatagaggagcatttagaacatttgcgtgctgtttttgacgctttgcgtgctgctcgcttgtttggtaacatggaaaagtgcacattttgcacgcaacgtgtctcgtttcttggttatgtggttactccgcagggcattgaggtggatagcagcaagattgctgccattcgggagtggcctacaccgacgacggtcacacaaattcggagctttcttggacttgccggtttctaccgcagatttgttcgtgattttagctccattgcagcgcctctacatgagcttacaaagaaagatgtgccgtttgcttggagtgattcgcaggaggtagcgttcagcactttgaaagataagttaacccaagctcccctattgcaattgcctgattttaataaagtgtttgagcttgaatgcgatgctagcggtattgggctaggtgctgttttgttacaagaaggaaaaccagttgcttattttagtgaaaaattaagcggtgctagtctgaaatattctacttatgataaggagctttacgctttagtgcgcactttgcatacatggcagcactatctttggcatcgtgagtttataatccattctgatcatgaggctttaaaacatattcgtacccaaacaaatctgaaccgtcgtcatg

SEQ ID NO: 554 - DNA, 1444 bp, Zea mays
  source (0)...(0): Zea mays BAC clone full insert sequence contig bacm.pk010.m07.fis36
gatcagctccttaacactcagcaacagcttgctgaggctaacgagcacctggacatgcatcaccaagagatccaggaccaggaggacgacgaggacgtcgacattgagggaggagatgagcctgcctccagtgtggacactgctggctcgggaagaccaccttcccccgagtccagtgttgcttcgttcgctcgctaggtgtccaaggtaggcttagaagtcggacagtcggactcctcgcagctagcttagcttttgcacccttggggtactaggctaggtagggttgagtcattttagaacaaattgatgtaatcatgttaaactctcttgggggcttgtttgaggaatgctattatcagtttaatttggaaggaagaatttatgcctcttaaagaatcccttttgttgaagttagatctttcatgctgtttttaacttttccccgtgttgaaatcttgaaattggaactgtggtgttaagtaagcatgtggtttttcagatggctgggaggcagcgtcgtggccagaacgagcgcgttccaccaccacccccacctcccactctgcaggagctcatggctcagcagaatgagatcctgaggcagctggctcaacgtcagccaccaccccagcattatggtggtggagaccaccagcgtcaccccgcggtggccacctatcaggaattcctcagcacccagcctccactgttcacaagggcggaagacccacttgacgcagatgtatggctgcgagtggtggaatccaaattcccactgctccatggagtttgctcagaggtcaccaaagtcaggttcgccacccagcagcttcgcggacctgcaaggacttggtgggatcattttcttgctatgcagccagaggaccgagaggtggagtggagggagtttaaggcagcttttagaggacaccatataccagccgggatcatggacaggaaactcaatgagttcttggcactcactcagggcaacaggacagtgttgcagtatgcccaggcctttaatgacttgtgccagtatgcgggatatcatgcggatacagatgagaagaagagggacagattcagaagggggctcagcactaagctccgggatcgtctcaacgccgtcagggccaacagctacaatgagttagtcaacatggccatctcccaagaggactgcattaccgctaggcaggcagagaagaaaaggaagacccctgtggcaggaccctcagctcagccacagcgtttccggattgtgtccgacccccagggaaggggaccccagcagcagcaagggcgatgggtaattcgacctcagcagcagcagcagcaggcacccaaccgcaatcaatttccagcacagcggaatagtcagcagcagcagtaccgccaagccaatgacaacaggtgcttcacttgtggcaacactggg

SEQ ID NO: 555 - DNA, 1187 bp, Zea mays
  source (0)...(0): Zea mays BAC clone full insert sequence contig bacm.pk010.m07.fis37
  misc_feature (1)...(1187): n = A,T,C or G
ggagaaaaataaggaagtggcgttgactcggtttatggcgtgatcaaacgaaatatggtggcggcacgctagggtttgaatggtggaataacacaatgcaaccagcaacaaatgatgtgaaagcacacaaattcaacgatgtagattattgaaagaaagtgcgaggctcaaaagggtgctgggataaggtctaacctaaatttttatgtggttttgtggactataggagaaaaaacactcgataaactcaccgatcaacctggaaatctgataccacttgatagagctggagtgcccgatctttcggttagtggagataattccgatttggttgaagtagaccctcacgatccgactacgacgagcgaacccgaagcgccaatgcaatcgctgaaccaactcccaatggttactgaccttgctgatgcgagatcgacctgatcacgaagatcgtttcctgtgcgcaatcgaagaacgaacaagaaaaagatgcgagcaatcttaatatcactcgaggtggagttctgaatcacagaggacagcacgtatttgtgcgtgttctggggtagctaaagctagatgtaaaacaaaactcaagttctaaatgaaacaggattctgactaaatagaggagaggcgtgaacagtagggccggcgctacagtaccacggttactgttcacgacttccctaggcgccccatccgggccttcctgttgggccatcttctaatcttctgggccttcgttctttaacagcatgatgtagttcaattctcttgcacgggcccgagtcactggcccaggtggaaggggtggcgcctggactggggaagatggtgcctgggctagagaaggtgctgctggtgtagatgtactcgtgttggtgttgatgtcctcatcagatactttgacatttgtttgcaagtagtagtacttacagttgttctttgagcatctctactttagatcctgtattttgattgttaacttttaataaatgaatttatgatgaatctgtagaatctacttgatgggtcaatcagcaggagcacatatcgcggcctgcgctctcttagagcaagcaattaaggaatctaagggagagaatacctattggaatgtggctcaaataaaagcatattttggtttatcaggaaaatcgataccgtcgccntccgtttttgaa

SEQ ID NO: 556 - DNA, 1651 bp, Zea mays
  source (0)...(0): Zea mays BAC clone full insert sequence contig bacm.pk010.m07.fis38
caaagcacgagtttttgccaatggaaccatttcttcgtttttcgcaacaagcatgcccaatccactactttaggtccaaaactcatgtttggggtggtttcacgcaatttcgttgccgcacgtcacacattccaaaaatgggtgtcggggtgcaaacaaagcacaagtttttgccactggaactatttcttcgtttttcacaacgaacatgcccaatccactactttaggtccaaaacacatgtttggggtggtttcgcgcaatttcgttgccgcacgtcacccattccgaagacgggtgtcggggtgcatacaagcacgagtttttgccaccggaaccatttcttcgtttttcgcaacgaacatgcccaatccactactttaggtccaaaacacatgtttatggtggtttcgcgcaatttcattgcctcacgtcacccattccgaaaacaggcgtcggagtgcatacaaacacgagtttttgccaccggaaccatttcttcgtttttcgcaatgaacatgcccaatccacttctttagctccaaaactcatgtttggggtggtttcgctcaatttcgttgccacacgtcccccattccgaaaacgggtgtcggggtgcatacaagcacgagtttttgccaccggaaccatttcatcgtttttcgcaatgaacatggccaatccactactttaggtccaaaactcatgtttggggtggtttcgcgcaatttcgttgccgcacgtcactcattccgaaaacgggtgtcggggtgcatacaaagcaggagtttttgccaccggaaccatttcttagtttttcccaacgaacatgcccaatccactactttaggtccaaaacacatgtttgggggggtggtttcgcacaatttcgttgccgcacgtcaccattccgaaaacgggtgtcgggttgcatacaagcacgagtttttgccacagaaaccatttcttcgtttttcgcaacgaacatgtccaattcactactttaggaccaaaacacatgtttggagtggtttcgcgtaatttcattgccgcacgtcacccaatccaaaaatcggtgtcggggtgcatacaaagcacgagtttttgccactggaaccatttcttcgtttttcgcagcgaacatgcccaatccactactttaggtttaaaactcatgtttggggtggtttcacgcaatttcgttgccgcacgtcacacattccgaaaatgggtgtcgggggtgcaaacaaagcacgagtttttgccactggaaccatttcttcgtttttcagaacgaacatgcccaatccactactttaggtccaaaacacatgtttggggtggtttcacgcaatttcgttgccgcacgtcacccattccgaagacgggtgtcggggtgcatacaagcacgagtttttgccaccggaaccatttcttcgtttttcgcaacgaacatgcccaatccactactttgggtcccaaactcatgtttggggtggtttcgcgcaatttcgttgtcgcacgtcacgcattccgaaaacgggtgtggtgcatacaaagtacgagtttttgccaccggaaccatttctttgtttttcgcaacgaacatgcatcaagcgaaacgataccgtcgacctcccctgtggattaa

SEQ ID NO: 557 - DNA, 1442 bp, Zea mays
  source (0)...(0): Zea mays BAC clone full insert sequence contig bacm.pk010.m07.fis39
aggctatgttgtgacaccgcagggaattgaagttgatcaggctaaggtggaggccatagatagctggccagtccctaccacggtcacgcaagtccgaagctttctcgggcttgcggggttctatcgtcgatttgtgaaagatttcagcaccatcgcagggccattgcacgagcttactaagaagggtgctccattttcttggggcaaggcgcaagaggttgcatttgaaacattgaaggataggttaactcatacaccccttctccaattacctgatttcagtaagacttttgaattggaatgtgatgctagtggtattggtttgggtggtgtcttgttgcaagaagggaagcctattgcttattttagtgagaaactgaatggacccagtctgaactattccacttatgataaagaattatatgccttagttcgaactttggaaacatggcaacactacttatggcctaaagaatttgttatacattctcatcatgaatctttaaagcatctaaggagccaaacaaatctgaaccgtaggcatgccaagtgggtcgaatttattgaatcttttccctatgtgatcaaacataagaaaggaaaagacaatgtcattgcagatgccttgtctcgccgttataccatgctgtctcaacttgattttaagatttttggcttggaaacaattaaacaacaatatgttttcgatgctgatttcaaagatgtgctattacattgtaaagaaggaaggacatggaacaaatttgttctcactgatggctttgtgtttcggactaacaaattatgcattccagctggttccgtgcgtatattattattacaggaagcacatggcagtgggttgatgggacactttggtgtgaagaagacagaagacatcctggccagccatttcttttggccgaagatgagaagagacgtggagcggtttgttgcttgctgcactacatgtcaaaaagctaagtctcgccttaattcacatggtttatacatgcctctcccagttcctagtgcaccatgggaggatatttctatggactttgttttacggctatctagaacaaagaaggggaggaatagtatttttgttgttgtggacagattttcaaaaatggcacactttataccatgtcacaaaactgatgacgctacccatgttgctgatttgttctttcgtgaagttgttcgtttgcatggggttccaaacactattatgtccgatcgggataccaaatttcttagtcatttttggaaaacgttatgggctaagttaggaactaaattgctcttttctactacttgtcaccctcaaaccgatggacaaaccgaagtcgtaaaccatagtttatctaccatgcttagggctgttctgaaacataacatcaaattgtgggaagaatgtttgcctcacattgaatttg

SEQ ID NO: 558 - DNA, 1897 bp, Zea mays
  source (0)...(0): Zea mays BAC clone full insert sequence contig bacm.pk010.m07.fis40
  misc_feature (1)...(1897): n = A,T,C or G
tgatgttgagcgccttgttgcacgctgcactacttgtcagaaagctaagtcacggttgacaacccatggtttgtatatgcctttgcctgtcccttcttctccttggcttgatatctctatggactttgttttgggcttgcctagaactaagaaggggagggatagtatttttgtggttgttgatagattctctaaaatggctcactttataccttgtcataaaactgatgatgctagcattgttgttgaattgttctttagagaaattattcgtttacatggtattccaaaaacaatagtctctgatcgcgatgctaagtttctaagccatttttggagatctctttggaataaattgggaactaaattgttgtttagcactacttgtcaccctcagactgatggacaaactgaggtagtaaatagaactttatctaccatgcttagggctgttttagacaagaatttgagacgttgggaggattgcttgcctcatgttgaatttgcttacaatcatgccacgcattcttctacaaagatgtgccctttccagattgtttatggttacatccctagggcacctattgatttgatttcgcttaatgctgcaaacgccccacatgtagatgctgctgcacatgttgaacaaatgattaccatacatgaacaaacgaaacagaacattgctgctactaatgcaaaaaatcaggttgctggtagtaaaggaagaaaacatgttacttttgagccaggtgatatggtttggttgcacttgagaaaggatcggtttcctactttgcgccgttctaaattaatgcctcgtgctgctggtccttttaaggtgctaacaaagattaatgataatgcttatatccttgacctgcctgcagaatttggtgtttccactagttttaatgttgcagatttgaaaccatatatggccgaggatgaggagttgtcgtcgaggacgacttcacttcaagaaggggaggatgatgagcacatcactatgagtacgactacaccagcagcacctccacatcaagcgccacttccttcattagctgggccaatcactcgggcccgtgccagagatcttaacttcgtcatgctactgaagaatgagggcccagaaaaatagacgaccagcccaactgcggcccatagtggacgacctagggttggccgcccctaggggctgcgccccctctatttatccaggagctgcgcctcctttattctcgagttttgttttacgttagccttagctactctcgaacgcgcgcaaatctgcgctgtcttcgtgtattcagaactccaccctcgagtaatagattagattgctcgcatctttttcttgttcgttcttcgattgtgcacaggaaacgatcttcgtgatcaggccgatctcgcatcagcaaggtcggtaaccacagggagttggttcagcgattgcattggcgcctcgggcttgctcgtcgtagtcggatcgcaagggtcatcatccgccaaatcggaattatctctactcgccgaaagatcgggcacctcagcttcatcaagcttccacatcacccaacctaggacgcagaccggccacgtcaacaggaggcgccatcatcaccctaccccgagctgactcgggccgcagggaacaagaccggcgtcccatctggctcgctccgccagacaggcaatgatggcgtcccgcatactctgtgacgacggcggctctcagcccccttacggaagcaagaggacgtcagcaaggactcaatcgctccgacagttgtccctccgccaggctccatcgctccctcgacgggcacgacatcacaccagctgggtgccaaaatctctccggctgccacaacggcgtgtacttanggcgctagct

SEQ ID NO: 559 - DNA, 1845 bp, Zea mays
  source (0)...(0): Zea mays BAC clone full insert sequence contig bacm.pk010.m07.fis41
tttatggttacattcctagggcgcctattgctttgttttcgcttgatgctgcggacgccccacacatagatgctattgcacatgttgaacaaatgattaacctccatgaacaaactcaacaaaacattgctgctactaatgcaaaaaatcaggttgctggtagtaaaggaagaaaacttgttacttttgagccaggtgatatggtttggttgcacttgagaaaggatcagtttcctactttgcgccgttctaaattaatgcctcgtgctgctggtcctattaaggtgctaacaaagattaataataatgcttatatccttgacctgcctgcggaatttggtgtttccactagttttaatgttgcagatttgaaaccatatatggccgaggatgaggagttgccgtcgaggacgacttcacttcaagaaggagaggatgatgaggacatcactatgagtacgactacaccagcagcacctccacatcaagcgccacttccttcattagctgggccaatcactcgggcccgtgccagagatcttaacttcgtcatgctactgaagaatgaaggtccagaagaatagacgaccagcccaactgcggcccatagtggacgacctagggttggccgcccctaggggctgtgccccctctctctatttatataggagttgcgcctcctttgttttttcgagttttgttttacatctagctttagctaccccagaacacgcacaaatacgtgttgtcctctgtgattcagaactccacctcgagtgatattaagattgctcgcatctttttcttgttcgttcttcgattgcgcacaggaaaggatcttcgtgatcaggccgatctcgcatcagcaaggtcggtaaccattggaagttggttcagcgattgcattggcgcttcgggatcgctcgtcgtagtcggatcgtgagggtctacttccaccaaatcggaattatctccactcaccgaaagatcgggcactccagttctatcacattgccgcacgtcacccattccgaaaacgggtgtcgaagtgcatacaataacgaatttttgccaccggaaccatttcttcgtttttcgcaacgaacatgcccaatccactactttaggtccaaaacacatgtttggggtggtttcgcgcaattttattgccgcacgtcaccaattccgaaaacgggtgtcggggtgcatacaagcacgagtttttgccaccgtaaccatttcttcgttttcgcaacgaacatacccaatccactactttaggtccaaaacacatgtgatgaggacatcaacaccaacacgagcacatctacaccagtagcaccttctccagcccaggcaccatctaccccagtccaggcgccaccccttccacctgggccagtgactcgggcctgatgcggacatcaacaccaacacgagcacatctacaccagcagcaccttctccagcccaggcgccaccccttccacctgggccagtgactcgggcccgtgcaagagaattgaactacatcatgttgttaaagaacgaaggcccggaagaatagacgaccagcccaattgcggcccataatggacgacctagggttggccgcccctaggggctgcgccccctctctatttattcaggagctgcgcctcctttattttgggagttttgttttacgttagccttagctactctcgaacacgcgcaaatctgcgctgtcttcgtgtattcagaactccaccctcgagtaatagattagattgctcgcatctttttcttgttcgttcttcgattgcgcacaagaaacgatcttcgtgatcaggccgatctcgcatc

SEQ ID NO: 560 - DNA, 2292 bp, Zea mays
  source (0)...(0): Zea mays BAC clone full insert sequence contig bacm.pk010.m07.fis42
acgatagcttaaaaagggccaaaactcatgtttggggtggtttcgcgcaatttcattgccgcacgtcactcattccgaaaacgggtgtcggggtgcatacaagcacgagtttttgccaccggaaccatttcttcgttttttcgcaaccaacatgcccaatccactactttaggtccaaaactcatgtttggggtggtttcgcgcaatttcgatgacgcacgtcactcattccgaaaatgggtgtcggagtgcatacaaagcacgagtttttgccaccggaaccatattttcgtttttcccaacgaacatgcccaatccactactttaagtccaaaacgcatgtttggggtggtttcgcgcgatttcattgccgcacgtcatccattccgaaaacgggtgtcggggtgcatacaagcacgagtttttgccaccggaaccatttcttcgttttttgcaaaaacatgcccaatccactactttaggtccaaaactcatatttggggtggtttcgagtgatttcattgccgcacgtcacccattccgaaaacgggtgtcgggggagcatacaagcacgagtttttgccacaagaaccatttcttcgtttttcacaacgaacatgcccaatccactactttaggtccaaaactcatgtttggggtggtttcacgcaatttcattgccgcacgtcacccattccgaaaatgggtgtcggggtgcatacaagcacgagtttttgccaccggaaccatttcttcgtttttcgctacgaacatgcccaatccactactttaggtccaaaactcatgtttggggtggtttcgcgcaatttcattgccgcacgtcacccattccgaaaacgggtgtcgaggtgcatacaagcacgagtttttgccaccggaaccatttcttcgtttttcgcaacgaacatgcccaatccactactttaggtccaaaacacatgtttggagtggtttcgcgcaatttcattgccgcacgtcacccattccgaaaacgggtgtcggggtgcatacaagcacgagtttttgccaccggaaccatttcttcgtttttcgcaactaacacgtccaatccactactttaggtccaaaactcatgtttggggtggtttcgcgcaatttcgttgccgcacgtcactcattccgaaaatgggtgtcagagtgcatacaaagcacgagtttttgccaccggaaccatattttcgtttttcccaatgaacatgcccaatccactactttaagtccaaaacgcatgtttggggtggtttcgcgcgatttcattgccgcacgtcatccattccgaaaacgggtgtcggggtgcatacaagcacgagtttttgccaccggaaccatttcttcgttttttgcaacgaacatgcccaatccactactttaggtccaaaactcatatttgaggtggtttcgcgcaatttcattgcggcacgtcactcattccgaaaatgggtgtcgaggtgcatacaagcacgagtttttgccaccggaaccatttcttcatttttcgcaacgaacatgcccaatccactactttaggtccaaaactcatgtttggggtggtttcgcgtaatttcattgccgcacgtcacccattccaaaaacgggtgtcggggttcatacaagcacgagtttttgccaccggaaccatttcttcgttttttgcaacgaacatgcccaatccactactttagttccaaaactcatatttggggtggtttcgcgcaatttcattgccgcacgtcactcattccgaaaacgggtgtcgaggtgcatacaagcacgagattttgccaccggaaccatttcttcgtttttcgcaacgaagatgcccaatccactactttaggtccaaaactcatgtttggggtggtttcgcgcaatttcattgccgcacgtcacccattccgaaaacgggtgtcggggtgcatacaagcacgagtttttgccaccggaaccatttcttcgtttttcgcaaccaacatgcccaatccactactttaggtccaaaactcatgtttggggtggtttcgcgcaatttcattgccgcaagtcacccattccgaaatcgggtgtcgaggtgcatacaaagcatgagttttttccaccggaactatttcttcgtatttcgcaacgaacatgcgcaatccactactttaggtccaaaactcatgtttggggtggtttcgcgcaatttcattgtcgcacgtcacccattccgaaaacgggtgtcgggggtgcatacaaagcacgagtttccgc

SEQ ID NO: 561 - DNA, 4162 bp, Zea mays
  source (0)...(0): Zea mays BAC clone full insert sequence contig bacm.pk010.m07.fis43
tctaatcaacaccgggaggtcgacggtatctatcgcttgataggccgatctcgcatcagcaaggtcggtaaccacagggagttggttcagcgattgcattggcgcctcgggcttgctcgtcgtagtcggatcgcaagggtcatcttccgccaaatcggaattatctctactcgccgaaagatcgggcacttcagcttcatcatctactcgccaaaagatcgggcacctcagctacatcaattggtatcagattttcaggttgatcggtgagtttatcgagcgtttttttcctaaagtccacaaaaccacataaaaattcaggttagatcttatcccagcacccttttgagcctcgcactttctttcaataatctgcattgttgaatttgtgtgctttcgcgtttccttgttgctggttgcattgtgttcttccaccattctaaccctaacgccgccaccatctcccgtttgatcacgccacaaaccgagtcaacatcgtctccttgtttttctccttcggttacgtcaaaaaaaaacagaaaaaacaaaccgagtcaacggctgtttccttgtttttctccttcagttacgaaaaaaaaacagaaaaaaaacaaaccgagtcaacaaccgcttccttgtttttctccttcggttactcaaaaaaaaaacagaaacaaaaaaaaaaagaaaacgaaggagaaaggatacggttgtttcatcccggtcgtttttaaaacataacttgaggtaccttccgtaaaacgggcataacttttcgctcgggtgtccaaaaaatctgaaatttttacaggagcttgtcgacaccattctgagtccggccaaacttacctacggtctgtttggggttcgacaaaattgtcaaaaaaattcaggaaaataaagaaaaaaattcgtcaaagttctcgcacgcttttcagagaactttctgattttctatagaccacatctgatttctgttttaggtgaaacttcgtgtagctcctattttgttgcttcttgtgctgagaaaaatatcaaaaaaatcatacaaaaaaaagaaaaacaaaatcacttgtgattcctactagtggcctcgctagtacaatatttacggactgccattctgctagttccatccgtcctttgcacttgtggccagcaatatagtttcgtgatttgcactataattcaactttgcattattgtttgatcgtgctaatccttgacttgagtgcagcctacccaaaactccacatatttctacgacgagaaggtttctgtttatccaggcaatcgctcatccaatctttcaccggttccacctgttggttgcagttcaccactgtggcttggtaagaacggataagaacttgataacagcactagtgtgagcgccttgtgagcaatacacccctgtttttgtcgtttgtttttctccttttggtgttttggtgttgcgctaactatggcaggagcacacgacatggtggatgcccagttgcaggaagtaaggggacaagttgatggacttgctgcggacattaggacgatgcatgaacggcttgattcaacgatcacttcgacgaccgagcgtttcaaccaacttgaccttgctcaaacggcgactcgcaccacactcgacaccatcctggcacgccttgatgcattgaccacaaagatggagcaggaatacggcggtgacactgagcaggacgatggagatcgccgtggtcgtgcacgtcgtgtggttcgtcatccccctaatgacttattttctaagattaaatttaaaattccatcttttaatggtaaatatgatcctgctgcatatcttgattgggaattagaggtagaacagaaattttcatgccatgatattgctgctaatagccaagtgaaggctgccattagtgaatttactgattttgctttaatttggtggcatgagtataaacaaaaacttcccattaacagtgtcattacttggacccaattaaaagctgccatgcgccacagatttgttccttcctattatgctcgtgatttgcttaacaaaatgcagcgttttcaacaaggttcacagtctgttgaggaatattaccaggagttacaaaagggtatgcttcgttgtggtttagttgagtcggatgacgctgctatggcgcgttttcgtggtggtttgcacagggaaattcaggatatacttgattataaggattattttgatataaccactttgtttgaatatgcttgcaaagctgaacgtgaagtgcagggacgacgatcaaagacatatactaactctcttgcagggcggggtccaacacacagctcaactccttccagccctgcaccttctacgcctagcactacatcgcgcacagggacgaccaagccagtggcgccccctgccaaaggcgccgcttcttccacaggacgtacacgggatattcagtgccatcgttgcagagggtttgggcacatgattcgggactgcccaaacaagcgtaccttgcttatacgtgacaatggtgagtattcttcagccagtgattctgaggaaactagtcatgctatgattgccactaaccatgcagaaaatgaggaagtccacgttgatcccatcgacgccgataggtatgagagtcttgttgtgcagcgtgttctcagcacacaggttgcccaggccgaaaaaaatcagcgacacactctattccataccaagggcgtcgtgcacgaacggtcgattcgcatcatcatcgatagtggcagctgcaacaatttggcaagtacaacgttggtagagaaattatccttgcccactcgcacacatccacatccgtatcacattcaatggcttaatgatggtggtaaaataaaggtaacacgttcggtacgtgtccccttttcgctgggttcttattctgattatgctgattgcgatgttattcctatggaagcatgctctttgttattaggtcgaccttggcaatatgatactgatagtttacatcatggtcgttcaaatcattattctttcatgtttaaaggccagaaaataattatacatccaatgacccctgaccaaattttgaaagatgatcttactagggctgctaaaactgcacaacaagtcaaatcgacatcagccgcacctattaaatctgaaatcaagttgcactctcctgttttacttgctacacgtgctgattttgatgatctccatgaagctcataagccctgttatgcacttgtatgctcgcgcatgcttgttccgcttgatgatgcaccgtctttggatataccccctgctgttgttaaccttttgcaggagtatgctgatgtttatcctacggacttaccaccgggtcttcctcccctccgtgccattgagcatcagatcgatctcatccccggcgcttctcttccgaaccgcgccccgtaccgtacaaatccagaggagacgaaggagatccagcgccaggtgcagacgctgcttgataagggttacattcgtgagtctcttagcccttgctcggttcctgttttactcgttccaaagaaagatgggtcatggcgtatgtgcgtagattgtcgtgctattaataacatcacaattcgttatcgatatcctattccacgccttgatgatatgttagatgagcttagtggtgccgttattttctctaaggttgatttgtgtagcggttaccatcagattagaatgaaactcggtgatgaatggaaaacggcttttaaaacgaaatttggtttgtatgaatggttggttatgccatttggattgactaatgctcccagcacctttatgcgtttaatgaacgaagttctacgggccttcataggtttgtttgttgttgtttatttcgatgatatccttatttacagcaagtctatagaggagcatttagcacatttgcgtgctgtttttgatgctttgcgtgctgctcgcttgtttggtaacatggaaaagtgcacattttgcacgcaacgtgtctcgtttcttggttatgtggttactccgcagggcattgaggtggatagcagcaagattgctgccattcgggagtggcctacaccgacgacggtcacacaaattcggagctttcttggacttgccagtttctaccacaatcttgggtaa

SEQ ID NO: 562 - DNA, 4962 bp, Zea mays
  source (0)...(0): Zea mays BAC clone full insert sequence contig bacm.pk010.m07.fis44
  misc_feature (1)...(4962): n = A,T,C or G
tttgcattttggaaaataggaatataaaatgatctgtcaaacaaaacatactattgccaccctgtttctgctgttccaaactgagatactaaggttgtgttgccaatcctacatgacatatatacttattttctgtgctctgcagactgacgatgaacgtgaaatgtgtgcaaggactatctaccgcacaaacattgacaagaaggtttggtacctgcattcatgctactacctgtagttattcattctgtcatggttctgttttaatacacgcaggtcactcaagcagatctaaagttattctttgagtccatatgtggtgaggttggtcgttctttactccaaacacaatatcccttctgtacagctaaaagtttgcagaaatggtaccatcaagatcgatctggagaccaacaagatcatggacttcatcaagtttgacgtcggcaatgtggtcatggtgaccggcgggaggaacaccgggcgtgtaggagtgatcaagaacagggagaagtagtgggcagcttcgagaccatccacgtgttgtttggagctttttgctatgtctagttttctcctatttgttgtacaggaaaacatacaatggaattcaaatttggtggccccaaagtgtggagacttgaattcatataaagttaggcttaacattagtgcaaacagttgtattttagtttagatttagagtacacttatgtatgcgttgtttgacaatgcttatttatgatatattgaatgatacttatttatattatattaattataatgttgttcaatatatgtgtatgtatatttctctttcaaattattataacatgatatctaaaaatgattataaattgaagaatgtactgccgtgtaagtcatttcgtttaaatcttaataagacggtcaccaaaatgtctaatatcagtctcctaaataagatagtttctaaaacgtccattattagtcacctaaataagatggttttcctattgtaatcgtctattattgtaggatattcgagacagtttgataaatactttatgacttataatgtttgtattctctacggttctttagaagcagtgtcttaaacaaaaacctaattcaagatggtttatcggaaaaaatgacttaaacaaatacctttttcagacggttataaattaaaaattgtcttatataatatcttttaatacggtttataaccatcttaaatgtgggacatcttttacgactccatcaaatttggacacttcataagcgtcttaagaactaaaaattaaccgtctcatataacatgttttgtagtagtgataacaacagttatcaatccagcctaaggatggcacctttcaaaggtctctatggaagaaggtgtagaacaccactcaattggtctcagcctggagaaagagaagttttcggacctgacttagtgactgaagccgaaaggaaggtcaaactaatcaggaagaatctagaagctgctcaggccaggcagaagagttaccatgataagagaaggaaacctctccagttcgaggtgggagatttcgtgtatttgaaagtatcacccaccaagggagtgcagaggtttggaatcaaaggcaagctagcccctcattacattggaccttatgagatcatagaagcatgtggactcgtggcatataaattgaagttacctccaaaaatgtgtgtcatccacaatgtgttccatgtgtctcagttgaagaagtgtgttcgattgccgaccgagatcatagcagaaccagaattggagatagagccagatctatcgtaccaagagtacccttccaagattctggattgcaaggaaagatcaactcgggctaaatcaatcaagttgtataaggtccagtggagtaattactcagaggaagaggctacttgggagactgaggaattcttgcgatccaacttccccgattacctacctaaggaaattggtacgtaatcatacccaacccctcctcctgcccttcgaatctaaatttcagaaatataatcttagatcagaatgaagtaattatgaatcaaaatttaaaaggacttccttctgaagttgcaaagagaatgacattcgaagagcagtttgccctaataatagagcacccacttcttgtaagtctcacccttcgcttcaccccggaaggactctgacccgaatctcgggacgagattcctttaaggggggaaggttgtgacaccccagtgtcacctagggtttctctcagtgctaacccaagtattaacattttatgtgagccaaattaagcatgaagcatcaaattaacttgagaagaaaagatctactaagtgtatatctaaagaaccatgttccaaacaaataaggtttttcaaaaagggaaaagtgttgaaaccctaataccaaccctaattgcgctgtctcgtgctcgacgctgtgccaggcgctagagcgcgcactggcgttctcccgcgcacgccccgagcacttgtcagagcctcgccctcggccgtgcccgcccgcgcctataaagccttcccgggcgcgcctcacctcatgttgtgcttgaacattccaatccgagcccgcatctgaccgtggtgaccgtcacaagttggtgttcttctgcagtccgaatccagcatgttcaaatccttttccctttcggtcttctccctgattcctaagcaaaacaagagtgcacgggtctccatggtctaaatatgatggacatgaactcaagagtgtaatcacctgatggttgagttgacgagcacgagcgcgagtaatgggaccagaaattggtacttgtattggtatagatgcatcagtagtgtggatgtcttcatcaagcgggcagtacacaacgcatcaaaaacaacactcaaatgtttgaaatgctcttccatagtcttgttgtaaataaggatatcatcaaaatagacaacgacaaacaatcctatgaaggtccttagaactttgttcatcaaacgcataaaggtgcttggagcattactcaatccaaacggcataaccaaccattcatataacctaaacttcgttttaaaagttgttttccattcatcacccagtttcattcgaatctgatggtacccactacacaaatcaatcttagtaaaaataatggcactactatgctcatctagcatatcatcaaggcatggtataggatatcgataacgaattgtgatgttattaatagcgcgacagtcgacacacatacgccatgacccatctttctttggaacaagtaaaactggaactgagcaaggactaagagattcacgaatctaacctttatcaagcaatgcctgcacctggcgctggatctccttcatctcatccggattcgtaaggtacggggcacggtttggaagctgggcgccggggatgaggtcgatctggtgttcaatgccacgaagcgggggaagacccgatggcaagtccgtggagaaaacatcagcgtactcctgcaaaagtttagaaacagcaaggggaatatcctaaggcgggcatcatcaagtgaaacgagcatactagaacatacaagcgcatagcagggcaagtgagtatcacgtaggtcatcaaaatcagcacgtgtagcaagtaaaacaggagcatgcaacttgatttcagcattaataggggtggatggagtaggtgcatgttgctttgcagtttttgtagcccgagcaagatcatcttttataatttggtcaggggttatgggatggatattattttctgacccttaaacaagaaagaataatgattcgaacgaccatgatgtaaactatcagtatcatactgccacggtctatcaagtaaatgaaattgcgcgaaaccaacccaaacatgtgttttggacgtaaagtagtggattgggcatgttcgttgggaaaaacgaagaaatggttacggtggcaaaaactcgtgctttgtatgcaccccgacacccgtttttggaatgaatgacgtgcggcaacgaaattgcgcgaaaccaccccaaacatgtgttttggacctaaagaagtggatggacatgttcattgcgaaaaacgaaaaaatggttcctgtggcaaaaactcgtgcttgtatgcaccccgacacccgttttcggaatgggtgatgtgcggcaacgaaattgtgcgaaaccaccccaaacatgtgttttggacctaaagtagtggattgggcatgttcgttgggaaaaacgaagaaatggttccggtggcaaaaactcgtgctttttatgcacccgacacccattttcggaatgagtgacgtgcggcaacgaaattgcgtgaaaccaccccaaacatgagttttggacctaaagtagtggattgggcatgttccttgcgaaatacgaagaaatggttccggtggcaaaaactcgtgcttgtatgcaccccgatacccgttttcggaatgggtgacgtgtggcaacgaaattgcacgaaaccaccccaaacatgagttttggacctaaagtagtggattgggcatgttcgttgcgaaaaacaaagaaatagttccattggaaaaaactcgtgctttgtatgcaccccgacacccgttttcggaatgggtgacgtgcggcaatgaaattgcgcgaaaccaccccaaacatgagttttggacctaaagtagtggattgggcatgttcgttgcgaaaaacgaagaaatggttccggtggcaaaaacttgtgcttgtatgcaccccgacacccattttcggaatgggtgacgtgatgcaatgaaattgcgcgaaaccaccctaaacatgtgttttggacctaaagtagtggattgggcatgttcgttgcgaaaaacaaagaaatggttccggtggcaaaaactcgtacttctcctatttttgttatcgatnccgtcgacctggcgaggtaggaatggtgccccct

SEQ ID NO: 563 - DNA, 5044 bp, Zea mays
  source (0)...(0): Zea mays BAC clone full insert sequence contig bacm.pk010.m07.fis45
  misc_feature (1)...(5044): n = A,T,C or G
tacaaaaaggcccctagggaaaccccatttcaaatctccaagtggagagagagctagagctctctaattccctctaagtcccattttagcaacaagatgtatcatgatctcagatgcaccctggatgttcccaaggaccctgagcttagaaagaagatactggacgaagctcacctttccaaattctccatgcaccctggtagcaacaagatgtatcatgatctcagatctctatattggtggactagaatgaaaagggaaattgccaaatacatatccgaatgtgacacctgccagagaattaaggctagtcacttgaaggcagcaggccatttgcaaccccttcccataccatcttggaaatgggaggacatttgcatggacttcatagtgggattacccaatacctccaggcaccatgattctatttgggttatcgtggacagattgaccaagactgctcatttcttgcccgtgcacaccacccacaagaccgagaagtatgctgagatttatgttgatcagatagtgagattgcatggtattcccaagaccattatatctgacagaggagcactgtttgtggcacgcttttgggagaaactgcaagaatcacttgggacccatgtcatccgaagctcagcataccacccacaaacagatggccagacagaaagggtgaatcaaattttggaagatatgttgcgagcctgtgcactacattatggaaaggaatgggacaagtgtctgtctttggcagagttctcttacaacaatagctatcagtccagtctgaagatggcaccttttgaggcattgtatgggagaaggtgtaggaccccattgaattggtctcaagcaggagaaagggaaatttttgggccagacttagtactcgaggcagaggcaaaggtcagggtcattaccaagaacttggaagctgctcaggctaggcaaaggagctatcatgataagaggcggaaacctctacagtttgaggtgggagatcatgtctatcttaaggtatcccccaccaagggtgttcagagattcgggatcaagggcaagttagcccctcgctacattggaccctatgagatcaaggcaagttgtggacccgtagcttaccaattggaattgccacctcacatgtcagcagtgcataatgtgttccatgtatctcagctacggaaatgtgttcgtctacccactgaagtactcccggaaccagacattgagatagaaccagatttatcctaccaagagtaccccgtcaaggtattagatcaaaaggatagatcaactcgggcaaggacagtaagaatgtataaggttcagtggagtcaccattcaacagaagaagctacatgggagactgaggattttctacgctctcgcttccccgactttctacccaaaagagtcggtatgtaaccacagaacccccccacctgccctttgaaatcaattataagggaaactaagatagcaagaatagtctaagttgggaattcaacttaagaagggcttccttctgaagttgcaaagagaatgacattcgaagagcagttaacaagagaaacttgagtataaagaaagagtagcaccaacacaccttccagcaccctccaagggactctacctcaaatctcgggacgagattcctttaaggggggagggctgtaacaccccaggtgttgccatggctggagcacaccttggcactcaagactatgatcacatgtggaagaacttaaggagcaaaagtataaggggctttggaaactaagtttttaccaagagttgggaatgaccaaaggcattaccctaattgtgtgcaactatcacctagggagagggggaaagaaccctaggcctctcttaaaccctatctcccaaaaccatggataagaggggaaagagagtgagcaaatgtgcaaaacatgggtaatttttacccaaaccctaagcaacattataaccatcaattaggggagggaaatattacaaaaaggcccctagggaaaccccatttcaaatctccaagtggagagagagctagagctctctaattccctctaagtcccattttagccctaaatcaaagatcaaccgtgttcactttaaaaatggcaccaaaaccacttgggttctataccaaaaatgtgcaataccacttagggcacccactggaaaaagttgagctcgagactcggacgtttgacatgccatggcatggcttttgtcgtgatatgctcagtatgacacacctgttttggcacccgaagatctccctccctaggccgtatctgccccggcgtctcacagttgagtgacagccctaggtgccaggaagaggtctgcgccggacttttgcaaagattcgcacgtttgcgacctctggcgacatttgaacactggaagaaacaaaccgccacgtgttcgacgccgtctgccgcgccagagcacgcccgcgcgcgcgcccgcgccgcgcccaagccaagccagtgccctggtccgcgtccgcgactataaaacgcccaggagccttggccgtacccctccgcacgcgctcaagcctcaccggagctcagttcgccgccgtttgcccatacgcgacgtgcccgcggccacccgagcccctgccaccgtagaccggccagcccagccattcccaaccccgtccagcccccggagaagactgtgcacgtctccgtgaagctccccgagcgaggaatcgggctctgcttcaacggagaggccggcccaaggtcaccggacttcaaccgaccgccggcaactgtggaccgaggtacaccgtgcgcctctcttcgattccttgcacggttagactccttagacctccacgaagctccctatgcccttggattgaactatgccgctgtggataggccggagcacgcgccgccgacgagctcgcccgcctgctcacgtggaccgggcgattccggccatccccgacgacgagccgtacctcgacgtgatcgccagaccctccgagccaatcctacccttcgccggacctccctcgccgccggtaagccgcgccacccttttctttcccgcggctactgtttcagttgagggagggactgcgggtgagagggagagaaacccagggggttaagtgaaaggtcagagactcaagtgaatagtgccttaagggtagatctgcgaggtttgaattgttttaaacccagggacctcggcgcaaactgtttttccaggaaaacttaattaaaacctaatttaaattcaaacagaaactttaaaaacccataacttctgtttggtttatccaattttggtcaaaccaattttgccagactctaaatcatgtaacctatttaggaaaaatataaaaccccttggtacggtggaaaacttaaaagttctgatttaatgttaactttggccaaaagctaaataatagtaagaaaaatagttaggctatttgactaaggttaggaaaatttggagaagtttatattcacctactaacctgtttaaaaatgttaaacccctctgtccattacattaagttagttttaaccccttattccaaatatgcttaagtttaagaaaaataggaaaagtgacacaaatattgaaccagagggcacccctatttttgttaagatacttagttaatgtagttcactagaaaaatatatcataccctgttttagtgtaaaataattaagatctcttttaaattaataaaacaaggataacttagaaaaactccacaaaaataaccccaaggtgaaaacacccccacccttgggatcactgttgttttattagaaagaacctaagaaaaatatgaaatctgctgtttgacatttttcaaataataaggaagtagaaagtgcctttttgacattaaacttgggaaaatcatagctaattaaccaccccttagtttcctatggtttttagcacaaagacctattattaccagaggatgtcaacaaaaataacctttaggacagagcctacccctaactaggaggtgtagtgtaaagtgcccctttttgcctaacttttgttatttttgtttaaggcctaacttttataccttaagcctcaaattcttaaaacaagctaaaatagccagtgacaacccactgtaatttttacagaatttttagaaattattaaaaccatgatgtagttcaaacctaccttagaaaccctaaatggaaaattaaataaaggaaaatgaaaaatgtgaaataatgatttccaaaaccttgtactctgtccactagagtgtatcaagacaatacaaattctactgtgttatcctaaagccaaacctaagcttaaagggtaataagtcaaagtctatgtataccactagaagccccacagaaccaggaaaccctaagttaattcttaacttagtttctttaacttaatgttcttaaatcttgcataatcatgacatacatgttcattgcatttcgatagactgtaatcttgcggacggagagtacatcctcgtgccggagcaaggagctgcccaggaggttgccccagatccagcaccagagccagcaccagaggacctgcctgccactgctttggaaggcaagccccgattttatgcataacctgttatttatgctattttacttcacttaatgattgtaggattgattgtgcacttaggtgtaggaattgtttgaaaccctagttgcatgatctcaggaatccttttgaaatgaatactagtatgacaggtcgagtagttgctttaattaaataggatctcggtagaagacgagtgatttttctagcactcgcgcgagatcaggaaattgattgtacccactttcacactatcatgatactagttggtggacaacaatccatggngattggttgtttacgagatggaaaatggaataaggattaacgtgcggatacctgtgtcaagcgtttgaatgtactanacacataccgagaaatatggtaaatcggtaagcctagtacctgagtgaacctgcccgcagac

SEQ ID NO: 564 - DNA, 6464 bp, Zea mays
  source (0)...(0): Zea mays BAC clone full insert sequence contig bacm.pk010.m07.fis46
caagaccgagaagtatgctgagatttatgttgatcagatagtgagattgcatggtattcccaagaccattatatctgacagaggagcactgtttgtggcacgcttttgggagaaactgcaagaatcacttgggacccatgtcatccgaagctcagcataccacccacaaacagatggccagatagaaagggtgaatcaaattttggaagatatgttgcgagcctgtgcactacattatggaaaggaatgggacaagtgtctgtctttggcagagttctcttacaacaatagctatcagtccagtctgaagatggcaccttttgaggcattgtatgggagaaggtgtaggaccccactgaattggtctcaagcaggagaaagggaaatttttgggccagacttagtactcgaggcagaggcaaaggtcagggtcattaccaagaacttggaagctgctcaggctaggcaaaggagctatcatgataagaggcggaaacctctacagtttgaggtgggagatcatgtctatcttaaggtatcccccaccaagggtgttcagagattcgggatcaagggcaagttagcccctcgctacattggaccctatgagatcaaggcaagttgtggacccgtagcttaccaattggaattgccacctcacatgtcagcagtgcataatgtgttccatgtatctcagctacggaaatgtgttcgtctacccactgaagtactcccggaaccagacattgagatagaaccagatttatcctaccaagagtaccccgtcaaggtattagatcaaaaggagagatcaactcgggcaaggacagtaagaatgtataaggttcagtggagtcaccattcaacagaagaagctacatgggagactgaggattttctacgctctcgcttccccgactttctacccaaaagagtcggtatgtaaccacagaacccccccacctgccctttgaaatcaattataagggaaactaagatagcaagaatagtctaagttgggaattcaacttaagaagggcttccttctgaagttgcaaagagaatgacattcgaagagcagttaacaagagaaacttgagtataaagaaagagtagcaccaacacaccttccagcaccctccaagggactctacctcaaatctcgggacgagattcctttaaggggggagggctgtaacaccccaggtgttgccatggctggagcacaccttggcactcaagactatgatcacatgtgaaagaacttaaggagcaaaagtataaggggctttggaaactaagtttttaccaagagttgggaatgaccaaaggcattaccctaattgtgtgcaactatcaccttgggagagggggaaagaaccctaggcctctcttaaaccctatctcccaaaaccatggataagaggggaaagagagtgagcaaatgtgcaaaacatgggtaatttttacccaaaccctaagcaacattataaccatcaattaggggagggaaatattacaaaaaggcccctagggaaaccccatttcaaatctccaagtggagagagagctagagctctctaattccctctaagtcccattttagccctaaatcaaagatcaaccgtgttcactttaaaaatggcgccaaaaccacttgggttctataccaaaaatgtgcaataccacttagggcacccactggaaaaagttgagctcgagactcggacgtttgacatgccatggcatggcttttgtcgtgatatgctcagtatgacacacctgttttggcacccgaagatctccctccctaggccgtatctgccccggcgtctcacagttgagtgacagccctaggtgccaggaagaggtctgcgccggacttttgcaaagattcgcacgtttgcgacctctggcgacatttgaacactggaagaaacaaaccgccacgtgttcgacgccgtctgccgcgccagagcacgcccgcgcgcgcgcccgcgccgcgcccaagccaagccagtgccctggtccacgtccgcgactataaaacgcccaggagccttggccgtacccctccgcacgcgctcaagcctcaccggagctcagttcgccgccgtttgcccatacgcgacgtgcccgcggccacccgagcccctgccaccgtagaccggccagcccagccattcccaaccccgtccagcccccggagaagactgtgcacgtctccgtgaagctccccgagcgaggaatcgggctctgcttcaccggagaggccggcccaaggtcaccggacttcaaccgaccgccggcaactgtggaccgaggtacaccgtgcgcctctcttcgattccttgcacggttagactccttagacctccacgaagctccctatgcccttggattgaactatgccgccgtggataggccggagcacgcgccgccgacgagctcgcccgactgctcatgtggaccgggcgattccggccatccccgacgacgagccgtacctcgacgtgatcgccagaccctccccgagccaaccctacccttcgccggacctccctcgccgccggtaagccgcgccacccttttctttcccgcggctactgtttcagttgagggagggactgcgggtgagagggagagaaacccagggggttaagtgaaaggtcagagactcaagtgaatagtgccttaagggtagatctgcgaggtttgaattgttttaaacccagggacctcggcgcaaactgtttttccaggaaaacttaattaaaacctaatttaaattcaaacagaaactttaaaaacccataacttctgtttggtttatccaattttggtcaaaccaattttgccagactctaaatcatgtaacctatttaggaaaaatataaaaccccttggtacggtggaaaacttaaaagttctgatttaatgttaactttggccaaaagctaaataatagtaagaaaaatagttaggctatttgactaaggttaggaaaatttggagaagtttatattcacctactaacctgtttaaaaatgttaaacccctctgtccattacattaagttagttttaaccccttattccaaatatgcttaagtttaagaaaaataggaaaagtgacacaaatattgaaccagagggcacccctatttttgttaagatacttagttaatgtagttcactagaaaaatatatcataccctgttttagtgtaaaataattaagatctcttttaaattaataaaacaaggataaattagaaaaactccacaaaaataaccccaaggtgaaaacacccccacccttgggatcactattgttttattagaaagaacctaagaaaaatatgaaatctgctgtttgacatttttcaaataataaggaagtagaaagtgcctttttgacattaaacttgggaaaatcatagctaattaaccaccccttagtttcctgtggtttttagcacaaagacctattattaccagaggatgtcaacaaaaataacctttaggacagagcctacccctaactaggaggtgtagtgtaaagtgcccctttttgcctaacttttgttatttttgtttaaggcctaacttttataccttaagcctcaaattcttaaaacaagctaaaatagccagtgacaacccactataatttttacagaatttttagaaattattaaaaccatgatgtagttcaaacctaccttagaaaccctaaatggaaaattaaataaaggaaaatgaaaaatgtgaaataatgatttccaaaaccttgtactctgtccactagagtgtatcaagacaatacaaattctactatgttatcctaaagccaaacctaagcttaaagggtaataagtcaaagtctatgtataccactagaagccccacagaaccaggaaaccctaagttaattcttaacttagtttctttaacttaatgttcttaaatcttgcataatcatgacatacatgttcattgcattttgatagactgtaatcttgcggacggagagtacatcctcgtgccggagcaaggagctgcccaggaggttgccccagatccagcaccagagccagcaccagaggacctgcctgccactgctttggaaggcaagccccggttttatgcataacctgttatttatgctattttacttcacttaatgattgtaggattgattgtgcacttaggtgtaggaattgtttgaaaccctagttgcatgatctcaggaatccttttgaaatgaatactagtatgacaggtcgagtagttgctttaattaaataggatcttggtagaagacgagtgatttttctagcactcgcgcgagatcaggaaattgattgtacccactttcacactatcatgatactagttggtggacaacaatccatggggattggttgtttacgagatggaaaatggaataaggattaacgtgcggatacctgcgtcaagcgtttgaatgtactaaacacataccgagaaatatggtaaatcggtaagcctagtacctgagtgaacctgcccgcagacatatcccctcacgcgacctgagacgaggtctcccattccggttatggtgggtacaagtgcggtcactgcacgacggccagtcggggtcagtggggcattgtacgccaaggcggtgagccctgatctgttgccagggaatcgatggggacggttgatgtgtgtggggacggagtgcccctacatgtcgtgtgtttaggtttaccttgcaaggataaaaactcgattcgaatcgtctgcttctcgcagctaatgagactgcttgatccattgtactgcattgagtaataagtggaagtatgatgagttgagataagatgttgactgttaatgatgcttgctaccatgtatgagtagatagtccacttttagccttaagagagtcacacttaactttgattaagttaaaatcttgatttagaaactcagctagtgcttttggcaaccaaaccccacagccaaacagctgcatgtctagaggtagaggagtagactcctcacaccgggtaagtctagctgagtattagtatactcagccttgcttgtggcataatttttacaggttccctggaggagatggttgctgggataacttggccgaccaccctgccaccgggttggactgtcgagtgggaccctgcctcggctgaggaggagcatgaggagtgatgggacaggcttccccatctctctgttttatttaccgttagttttattccgctgcacttcgaacaatgatggatacttttgcaaaaactccgatgatgataatggtgatgtaataatttaacattatggcatgtatggttttatgctttattgtatttgctctgtgactcaccttcgagtgagattgtggtacttgatcctgtcagtggccgtgtcggactagatccgagggattgatgggttattcccatttaagtgtggtctagcctctaaggcgggacttggacacttaagttggaataattcgggcagttccgccacagctggtatcggagcttgtaccaccacagaggaatcaataaaatgtaaataccatcaattttctaaataaaacttgatagaaacaagttggatagatagtaggacgagcaggatagacctaggacgtgaagccttaggttaatagaagggtagctaggtggctaagtaactaggccctacagaccacttttacaggatgggagttcctccctattccttctatcttgttgtgaggtcgttcaggacgagcatgcatgcattcaaaattaagcaattggataactgagtaaaagacttaaaaacaagataacaaccaactaggtccctagtgcctttttacttaactagaggagggctgagttttattttccttgttctttttacattctttttcttttacttacgcttgaccgtacacagatgacttcccacggatcctccgatgaaggaaatgcactgacccacactgacggacttgcacgagagggttttccccgcattttatgggaagtgcttcagggagccggatacatgacaccccctcagtacgcggtgcagcagttcgagaagcaccgagtgccccgctgtagggtgaggatgactctggagcctcatcccctgcagccaggctggcgctccttggactcagagtctttcgggtaccgggcagaggacacgatcgaggcgatcgctctgcatggattgactaccttctgcgggttccatcccttggagctggctacccatcccattggcttgttccccgctgaaaaggaggacgacccaatgtggaaggatcgggtggaacatgccaaggacatctgggccatctacccaggacagactgcgcacttaacagtacggtgcatgaatgctctgtaccatctgcaagtgatgcgcggtgaggcaatgtcccatt

SEQ ID NO: 565 - DNA, 9603 bp, Zea mays
  source (0)...(0): Zea mays BAC clone full insert sequence contig bacm.pk010.m07.fis47
ccatagtcgagtttttgttttttggcttaaattaattaagagatacaaatgttgctaatattttctgcaaacttagagtttgactggaaagaataccatagcagtccttattttgggacagaggaagtgtgtcttgatgcatccaaatttgcaagcacgctggtgaaggctatcacctattagataatgatggacagtgacatgcatacttgttttttgtcttcgaaaattggaatgctaaagctcaagcagcttgtcgcttttaatacatataaaatctaaattgtttccgaagaaaaaaaatgccacaaccatatgtactgcctaagatgggatatgacgttcaattaaatggcattcatgttttcttactttacgtctcaatgacatgtggctcctgaacttcacatgccattgagacataaagctacaaaatcctgaatcaccactaaattgagtgacatgtcctgaatgattcccctggatctgacagtttgtctgacaccttgagctggtctgtagagctgggaaaaaacaatggactgccatagtccaggtcaaggtttaatgcccgccagcttcaaagtgcggacaattccacttgatggtgatgaggatgcaactgaggaggtcttggatcctgattttggggaagccgcaataggccgtgtggcacctgttgattcaggtaatgttgataatgggtttggttgtttttgttttggctactctgcattccctgctttaattttggtacctgataaaaactgggcttcaggtctatggtggatcatattgctgagggcatacggaaaatgttcaggggatctgtcagtacaagagagaattgatgtccagaccggaatgaaaatgattctgaagctttgcttagctgatggtttcgacatgttccctacattgctcgtaacagatggttcatgcatgattgatcgtcgaatgggaatccatgggcacccacttgaaattcaggttttctttttgctacacctagttatattttctgtttcatacgggtcttttttcccaagttgattttttgtgattgtttttgaggcaccttttaaaagaataaaatacacaaacattcttcaaattgtctgggaatgtcatctaggttcccaaacgattagtttggattcaaaacatccctgatcttcctaaatggttcactcagggttcgatccttcaaaatcagctagtccacgaccatcctacttggcagcccctacatctctttctcccccctctcgttcacaccttgttaatgtccatcagcatagagtcttgttagtgtccacgtcgccagccaaaggatttaccatggggtttgcaccttgagtgaaccacataacaagttgagggacatgaaattgcaaattaatagctcagggatctcgataacatgcttggacaagttttagccactgctgatgcatcttagtcctattaaaagtgtaatttacagtgccacgtcccctattttacacgatccaccgaagacaacttaggactacagcaagacctgtctagatgtctaaaaaaatgacagacccagtgctggcagctctcacatgagtggggtccggaggagtaaccaaggcaatccttacctctgcattttgcagagaggctgcattgaatcctagaccttttgctcagtggaaaggtttctcaccattgtgccagacctgcccttctcacttgtctagatgtctacaaggaaaaaatccagcatcctagaggagttgcagagattagtttctttttaatttgatcttttaatttatcgaaatagcagattttatgtcagaagtttgtacaagtcttgttcttgtaggaatatgcaaaatctaaccctaggatagggtggcctgtgtattaatagccatttggagttgggcctggcccattacagagggacaagagagtaaatgtacccaaaccctaatacagttccaacacccctccgcagtcacaactctatcctgtacagatgttgagactagagcgaaagtctaaaaatacactcgacggtaaccccttgtgaagatgtcagcgaactgcagcgtagttgggacgctgagaacccgaacgtcaccgacggcgacacgctcgcggacgaagtgcaggtcgatctccacgtgcttcgtgcgctgatgctgtacgggattggtggagaggtagactgcgctgacgttgtcgcagtagacgagggtggcgcgctggaggggactgtggagcttgtggaggagctgtcgcagcaggaggcctctgccacgccgttggccacggcgcggtactcggcctcagcactggagcgagagacgacgggctgccgcttggcggcctaggagacgaggttggcgcccaggaacacggcgtaaccagaggtggatcgacgcgtgtctggacagccagcccagtcggcgtcggtgtagaccacgagttccgacgtcggggatggtcggagaagaaggccgtagtcgagggagtcacggaggtagcgcaggatccgcttgagagcggtgagatgaggctcccgcggggtgtgcatatggaggcacacttgatggacgacgtaggcgatgtcaggcctggataaggtgaggtactggagcgcgccggtcaggctccggtaggatgtcgcatcggcgaccaggggcccgacgtcctctgagagcttcgcctgagtgtcgacaggcgtggagcagggcttgcagtcggacataccagcccgctccagtatgtcgatggcgtactggcgctgatggaggaagagaccctggggccggcgctcggcggtgatgccgaggaagtggtggaggggccctaggtccttcatcgcgaactcccgctgcagggcgacgatcgtgcgctgtaggaggtcggcggtggatgccgtgagcacaatgtcgtcgatgtagagcagaaggaagacggtgtcgtcgccgcggtggtagatgaagagggacgtgtccgacttggcctcgacgaagccgatggaggtcaagtaggaagcgaagcggctgtaccaggcccgcgacgcctgcttgaggccgtagagggagcggttcagcctgtagaccagatctggacgggcttcgtcgacgaagccggtgggctggctgcagtagacagtctccgtcagagtgccgtggaggaaggcattcttgacgtcgagctgatggatcgcccagtcccgggagagggcgagggagaggacggtgcgaacagtggcgaacttgacgacggggctagaggtctcgtcgtagtccactctggggcgttgggtgaagccccgaaggacccaacgggccttgtagcgatcgagggagccgtccgaagtaagcttgtggcgaaatagccacttgccggtgaccacgttggcgcctggtggacgtggcaccaggtcccaggtgtggttggccaggagggccgcgtactcctccatagcgcgtcgccagtgtggttcggcgagagcggtgcgaacggaggaggggaccggggaagcgtccggtggagtggtaggcgtagcagctgccaagatcagccggtcgacaatcgaaggacgccagtggcgcgctgggtcaccatcgggtggacgtgccagggatcgcggtggatagcgaccgagtggtacatcggtggctcggggcggtctgccgggacgtcaggggctgcgggcgtggccgactcgcagcgatgatggatgacggcggggtcggcgaagcgcaccgggctcgtcaacgggcccgggtcagcgactgccgaggtagtgacgtggcggtgacggtggtagatgagcgcggggtcggtgaagcgaaccgttggcgtcgacggggccgcgcgaggtgcgggaggggtcggcggggccgcccgaggcgcgggcgtggtcgacggggtcgcgcatggcgcaggcgtggtcgacggggccgcacgtggcacatgcgtggtcgtcggggccgcgcgtggcgcaggcgtgatcgacggggccgcgcgtggcgtgggaatatgtgcgagccgcggcgtcgaggccgcatggggtgcgggtaacgacgcaaggcggggcgcctgggaggagggggagactggatcggactcgaggagggagtcgagatcggtaggcggggaggggccaacaaggggaaacacatcctcatcaaagacgacgtgacgagagatgatgatgcggtgggaggtgaggtccagacaccgatatcccttatggtcagatgagtagccaaggaagaggcagtgggtggagcgaggagaaagcttatgaggggcagtagcagaagtgttagggtagcaggcacaaccgaacacgcgaaggtggtcgtaggtgggggctgtgccgtacagggcgaagtagggagtagggtggctcaccgccttggagggaagacagttgaggaggtgggtggcggtgtgtagggcttctgcccagtagctggcagggagagacgcctggaagagaaggcagcggatcatgttggtggtggtgcgaatcatgcgctctgcccgaccgttctgggcggaggtgtaggggcacgagagacgcagctgaacgccactggtgaggaagaatgaccgagaggcgtggttatcgaaatcgcggccgttgtcgcaatgcaaagcacgaaccgggcgctgaaactgggtggatacccaggcgaagaagtgagtgagggtggtaaacgtgtcggacttcaaccgaagggggaaagtccaaagaaaatgggagtagtcgtccagaatgaccaggtagtatttgtagccggagaggctaaggacaggagacgtccagagatcacagtggacaagatcaaaggcctgaacaaccctggacgtggaagtggaaaaaggaagacgagagtgacggccgagctgacaagcatgatagaggtgctcagaagagcctcgagtataggatatgtctgagtggctggagagttgggacatgacgtcaggtccagggtgcccgaggcaacagtgccaaatggcggaggaggtggtggtagtagcaagagcatgtgatgtggtggtagtagtaagtgcaggagatgaggctattctggtgggggaagtggagggcaagtgaagagaatagaggggaccggagctgtcacagcgagcgagcacaacatgtgtgggaaggtggcgtatggtgagatcccaggggtcgaactccataaagcagtggttgtcactagtgaagcgacgaaccgagaggaggggatgagtcagaccgggagcaacaaggacgtcgttaaggcagaatggtccaggaagaactgatgcacctactgatgtgaccggaagagtggaaccgttgcctacgacaatggaggaaggatgtgaggggtgtggtggatgggagtggaataacgaactagttgtgggagtggtgtggaaggaggccccggagtcgaccacccaatcggtgggagagggagacagtggggaggccatagggtgcacggagagaccagaggatgagctctgacgtggttactgggaggggagggagggaacgagggctcaatggccagggaggcgatcactgcacgagggaagacaaggggtctaggcacgtgacggtcggcctgggggtggagttcgacgcagtcacaaaggacagggctcatggtgggatcgaagctcacgaaggtgccccggacgagctggccatcgttgagaaggacgcgcacagccatcccgacagaaacgggcggagacaagaagtggcgccgacggccagggcaaaagcacgaccgtggtagtcaggagccacgggagcagcgggcgaggcaaagctcatgtgtggtggtggggacgccatggaaccgggacggagctcaaccggcgcagcaaagccgagggcgaggatgtccactgtgtcacagaagcagggcgcacagggggtgagcgggctgtacggccacgactgctgctccggccaggccaacccactgcggcacgacaggagggagcgcaggggggcaggctgctccggcgaggccgacccacttgcggcacgggcttggaagagcgggcacggcgccggggcccagcgcagcaggagaggggccagatggcggccggcggtggacgacgaagattcggcggccggggcagggatcggcgggctctgtaggtgctgggggcggggcagagaggaagcaagagcagcgagtcggcgctccggcggttgcaacggtccaaggcgctcgtggccgacagcgccacgcgcagccgcacgcgcctgctgcttcagtcggacgatgtggccgcgcgcgaggggagggcgcggatgtggtgggcggtgccgcggccaccgagcacgctagctggtcggggcgcggtggagcccgagctcgccggctgggggagggagaggtgagcgcggccggatggtcgacgacgcggttgagcccgagctcgccggccggggggaggaggaagacgtcgaccggagaagggggagaagcgggtgcggccggcgaccaggaaggagagaggggatggaggcgatctggcggtggccggagggggatggggaaaggggcagcggcggcggccaggggctggcggccggctaggggagggaggaagtttgtgtggctctagtaccatgtaggaatatgcaaaacctaaccttaggatagggtggcctgtgtattaatagccatttggagttaggcctggcccattacagaggggcaagagagtaaatgtacccaaaccctaatacagttccaacagttctaatcctgagctgatgtaagcattttccacctaaaagttaacatcacttgcgcttgtaatctaaatgaaaacaatctaatgttcaaagcctgttgcaatatgttcaaagtctgttgcaaacttgcaataaaacatggatactatcgggggttttatataggggatgaatttgtattggaaaatggcctgaagcagtgagctttttggattgattggcatggatagacaagttgatcattagtagcagtgaggatggtactgcagagaataaactaatgcagacaacatttgtgattaggacagacacaagtttacaaggacaataaccatgcaaaactcaatccaagctccatggtctcaaaaaagaaaaagaaaaaagaggcacacattttttctgtacatgataagttagctcatgcacattgttttgtgtgtaggcactcttctattcagccctcttgtgtgcgcgtgagatgttgactcaagaagatggatcagctgacttaatccgtgccctgaacaatagacttattgcactgtcctttcatatcagagagtactattggcttgacatgcaaaaattgaatgagatatatcgatataaaacagaagaatattcttatgatgctgtcaacaagttcaacatttaccctgatcagatttctccatggcttgttgagtggatacctcctaagggtggttactttattggaaacctccagccagctcatatggacttccgattcttttcactgggaaatttatggtcaatagtaagcagcttggcaacaactcatcagtcgcatgccattttagaccttattgagtctaaatggtctgatttagttgcagagatgccactaaagatatgctatcctgctcttgaaaaccaggaatggaaaatcatcactgggagtgaccctaaaaacacgtgagccttagatgttttttcaatttttaccctctacctgggatcatgttgcagttcctttttacatgcttggcaatttctttttcgtacaggccttggtcataccacaatggaggatcctggccaacattactgtggcaggtttgcattctctaaactggtttcctatttctgtagatttactgtgtcttgctgttgaattggtttttatctgtccgcatgcaaggcatggtgtcattttgacacactgctgcatttagccaaacttgctgagatttactggcaatctgttcgctcgcattttgcacttctcctttatgatgcgcacattgaatgttgttgagcagtggcaaccattttgtgcagctcacagtggcatgcatcaagatgaacagaccagaacttgctgccaaagctatagaagtagctgagaggcgaatcgctactgacaaatggccggagtactacgacaccaagagagcacgattcattgggaaacagtcgcggctgtaccaaacgtggtctattgctgggttcctagtagccaagctactaatagaaaagccagacgctgctaggattctgtggaacgatgaggatgctgaaatccttaatgcttcgagcacaaacagaaaacgtggcaagaaagtgttgaagaaaacatacatcgtgtgagttctcgcagcaagttcgattaaattcctcagttagcatttttaagttgtaatataggaagtgttgtccctgtatataaacttaaatgaggttgcatttttgctggggagggtgcctgctgttggaattggatgctgttattgtcgatgcatctggctttgcaacaaatcatagacctgcctcgtagtttcgctatacactttatttggcatgacaagttttcggagtctcattaccggactgaagccatatttgaatacactaagctaacgttagctgctaaaattagctgaagacattcaaataacttaactaatattctagctagtaactgcttttagctgaatgtattcaaacacccacctataatagtccagctatctattagttgcactcataactatccattagtttaataccttggtcagttgagctaacatcagctaatagttagtcaattactagttagctagctgatttcactagcaatttttagtgacataactattagtactactgtattcaaacatgctcttaattttggaatatggatttacctcgttgctctggttttccaggtagtattacgaacatctttgaaacacacgagttgtcacaggtgctgacaacaatgttacatagcaagaccaagagtttaactaaaaattgatatcatcttgatttagctattttgtaaaatatataagaaaccccataaaaaggtaggctgcttcggagtctatctaaatttgccatcatatttagatcgtatttaaatgcattagaggtaatagttagctgctaaaattagttagagacatctaaacaatctatgtaacattttagttattagatgcttttaggtggaggcatttaaacaccctagctaagcgtccaactaactattagttattagttagccacctactagttcgtcaactaactacactagcaattttagtacatccaaacaagcccttaaaactgccatgtcctatgtccaatgtcttcattcgtcttcacgacaatcacaaataacgagccaatgtccttccacatgtagtcggctgccgtctaagagatcctttggaacataggaatttcagagaaataatacagaaattttacatgaatcaattaattttcacaagaaaagcataggaaattggaaaaaatcagcattccaaagggcccccagagtcctgagc

SEQ ID NO: 566 - DNA, 14120 bp, Zea mays
  source (0)...(0): Zea mays BAC clone full insert sequence contig bacm.pk010.m07.fis48
attgaatttagaatttttaaggctttgtgccttcataggtggccagtccaagactgccctctcccatttgaaagctcgtttcactactacagtaaacctctgtacaggcggtgcaccacaagcggttcctggaaccgcctgtgtagaggctatacaacatctcatgatagccgagccttacatagaggaacacctggatgagcttcgtaaagaaaatcagaaccgcacaggggactggatcatgagggagcacaaacatcgtttcagcgaatgcttaatggacaaaaacatcccattcggagactctttggaagagaaaacaatgaagaatttggcttctgggccatcgtgttttgtgacatcatggcaagcatatgacatcaatgggtacacattctacactaaatcaaaagacatgaaaagtgttgcacaaaatagcgatgttcgtatcgatgcttttgacctacatggacagaagaccacatattttggattcatagaggaaatatgggaacttgattatggcccaagcatgaaaatacccttatttaagtgccaatgggtacaacatcccgtgggggtgatagtggataactacggactcacactggtagacttaaagaaagtaggatataaagatgacctgtgggttctcgccgaatgtgttgcacaagtgttctatgtactcgatccagcagatgagaagatgcatgtagttatttctggaaagcaaaaaattgttggagttgagaatgtgggagacgaagatgaggaatacaataagtatgaagagatgttcgtctttaacggtccagagagaatcaagcgtgtggaaaagaaaattgataagaactgatgaggacatcaccatcattgatacaaccataccagtgaccacttcaccattcgtagctaatcaaggaccaatgacacgagcccgtgcacgtaaacttaattatcacgtgaactcgttccttgctattgaagctaattcttctttaaatgaggtactaaagccttgcgatgactttattatgctcaggtgtttgggaggtgaaccatcttggactggagaaggcaacaaggcaataaaggctgctgcacccgagaggatttcgtaacagcaccaagtacaagtttaaatggggcatatcttccaacttccaaggccgtttaatgcaaataaatacttgttggaaagctcccttcgtatacttgctggtggatcaagaattaatgggagactacacctgaggcgtccagaaactgccgagggaacttcatgactccaccagaattccttcttcctatttctctatttaagcaactagcagccaccaaagaacatgggggttttgtttgatgtaagtttagcctttgctacttccttgtaaacgcgtgtgtcggctagaccacccgaatacttgaaacgagaccccaactttatcagatcggtgcgtgtttgcttgttatcttgttcttgcttgttctcgattgcttgcaggttcaaggctgttcttggcacggcaagagcagcaacaacaggagccggtgtaactatcgctaaggcgcagcacccttgtggttgttgtagtcggatagcacaacgtcgacctccaccccaaatcgtagttatcaggagacggtgtacctgtcgctcaaggcgcaacaccatcttggttgtggtagtcgggcagccaacgtcgttctccaacaagttttccacctccatcatctctcatcgaaagatcgggcacccttctacccattgggtttatcaagaacttaaagccatacatgcggaaaaatggtagttcataaaaaattgtatgaatcaaattgtatttgtgtcggggaccataattaggggtaccctcaaggctcctaattctcagctggtaaccccaaccagcacaaagctgcaaaggcctgatggtgcgattaagtcagggatcagtccattcgagggactcgatcacgcctcgcccgagcctagcctcggacaagggcagccgaccccggagggtttccgtctcgcccgaggcccccctccagcggcgaacatatttccggctcgcccgaggccctgtcttcaccaagaagcaaccctgaccaaatcgccgcaccgaccgaccaaatcgcaggagcatttaatgcaaaggtggcctgacacctttatcctgacgcgcgccccccagccggcagagccgaagtgaccgccgtcacttcgtcgctccactgaccggcctgacagaaggacagcgccgcctgcgccactccgactgcggtgccacttgacagagtgagactaacaggcggtcaggccctgccgaaggcaccataggaaactctgcttcgcccgacccatggctcggacacgggctaagtcccggaagacggtgaactccgctccgcccgacccagggctcggactcgggctaagtccaggaagacggcgaactccgctccgcccgacccagggctcggagtcgggctaagtcccggaagacggcgaactccgctccacccgacccagggctcggacttgggctaagccccagaagacggcgaactccgctccgcccgaccccagggctcggactccgccctggcctccgcctcgcccgacccaggggctcggactcgacctcagccacggaagacagactcgacctcggcttcggaggagcttccacatcgcccaacctaggacgcagaccggccacgtcaacaggaggcgccatcatcaccctaccctgagctgactcgggccgcagggaacaagactggcgtcccatctggctcgctccgccagacaggcaatgatggcgccccgcattctctgtgacgacggcggctctcagcccccttacggaagcaagaggacgtcagcaaggactcaatcgctccgacagctatccctccgccaggctccatcgctcctccgacggccacgacatcacaccagctgggtgccaaaatctctccggctgccacaacggcgtgtacttagggcgctagctctcctccgctagacacgtagcactctgctacaccccccattgtacacctggatcctctccttacgcctataaaaggaaggaccagggccctcttagagggggttggctgcgcggggacgaggacgagataggcgctcgcttgaagccgctcgctccctctcccgcgtggacgcttgtaactccctactacaagcgcacccgacctgggcgtgggacgaacacgaaggccgcgggattcccacctctctcacgccggtctccgaccgcctcgctctccccccttcgcgctcgccctcgcgctcgacccatctgggctggggcacgcggcgacattcactcgtcggcccagggaccccccggtctcgaaacgccgacagttggcgcgccaggtaggggcctgctgcgtgttgacgaacagcttcccgtcaagctccagatgggcagtctccagcaacctctccaacccgagacggtgctccgtttcgggagtcttgagttcatgtccctcgatggcagctacgacatgatactccttccaccgccgcgcgacaacgacaatggcagccgactgcccgcccgccggcggcggaatcgacgacgtcttcctcgcgtggtggaagaacaaccttcgagctcatcccgccctcttccccgccgtcagaggggaaggcagggcaaccaaggccaagcaggaggcagcgcctcgtcggctgtcgagcgagtcgacagcgccggcaccccaacggggagcgcaccgggtatcgacttcgcgcttgagatgaagacgagtgtcgtctccccgcgacacgccaatcccgagcaagcggacgacgccagcgcgctcgcgaaaagcttgctggacgtcaccctcgtacctgagacgatggtgcagtcagtccccggcgtgactttatcgccgctcgtcgaccaaaaggtaccgaccgattcccatcccacgtcatttggattcagcctcaacccgcctagcgaccccgctttggcgggcgctctcgaagaggcgagtccaaaccctctggggtttcgcatgcggtcgccttgggaccggctgacggacgtctcgaccgtcgggccctctgggtccgaggaagactacgagcccaacatctgttgggatttctctggacttggcaaccccagtgccatgcgggacttcatgaccgcatgtgactactgcctctccgactattccgacggtagccgcagcctcggcgacgaggactacggcccgagccgcagcctcggcgacgaggactacggcccgagccgcgaatgtttccacgtcgatctagggggtccctccgaaggcaatcatctcggcatgccggaggacggtgatctccctaggccggtgccccgcgttggcatcccacgggagctagctgtggtccccgttcagacgggggggcatgacccacagctcgagcaaatccgcggggtgcaggccaggctcgacgagggagcaggagcgcttgagccgatccgccgggacgtcgggcaggcatgggcgggccaacccccggccggagaaatacgtcatctgccccagggcttccagcaccgcgtcgccgacgacgtcagggtcaggccaccacccgcatctagtggggtcggccagaacctggctgcagcagcgcttctccgcgcgatgccggagccatcaaccaccgagggccggcgaatccagggggagctcaagaatctcctggaaggcgccgcggtccgacgggccgagagctctgcctcccgaaggcaggggtacccctcggaaccttatgccacgacttcccgattcatgtgggaagcctcggtctacaccgggcgcacgcgcaacaccacgcctgtggccccgggccgcctcggcaacgagcaccatcaccgcgaccgtcgggcccacctcgacgagagggtgcgccgaggctaccaccccaggcgtgggggacgctacgacagcggggaggatcggagtccctcgcccgaaccacccggtccgcaggccttcagccgggccatccgacgggcaccgttccagacccggttccgacccccgaccactatcacaaagtactcgggggagacgagaccggaactgtggctcgcggactaccgtctggcctgccaactgggtggaacggacgatgacaacctcatcatccgcaacctccccctgttcctctccgacaccgctcgtgcctggttggagcacctgcctccggggcagatctccagctgggacgacctagtccaagcttttgccggcaatttccagggcacgtacatgcgcctcgggaattcctgggacctccgaagctgccggcagcagccgggagagtctctccgggactacatccggcgattctcgaagcagcgcaccgagctgcccaacatcaccgactcagatgtcatcggcgcgttcctcgccggcaccacctgccgcgacctggtgagcaagctgggtcgcaagacccccaccaggacgagcgagctgatggacatcgccaccaagttcgcctccggccaggaggcggtcgaggctatcttccgaaaggacaagtagccccagggccgcccatcggaagatgctcccgaggcgtcaactcagcgcggcgccaagaagaagggcaagaagaagtcgcaagcgaaacgcgacgccgccgacgcggaccttgtcgccgccgccgagtacaagaaccctcggaaacccccaggaggtgccaacctcttcgacaagatgctcaaggagccgtgcccctatcaccaggggcccgtcaagcacacccttgaggagtgcgtcatgctccggcgccacttccacagggccgggccacccgcggagggtggcagggcccgcgacgatgataagaaggaagatcaccaagcaggagagttccccgaggtccgcgactgcttcatgatctacggtgggcaagtggcgaacgcctcggctcggcaccgcaagcaagagcgtcgggaggtctgctcggtgaaggtggcggcgccagtctacctagactggtccgacaagcccatcaccttcgaccaggccgaccaccccgaccatgtgccgagtccggggaaatacccgctcgtcgtcgaccccgtcatcagcaacgtcaggctcaccaaggtcctcattgacggaggcagcagcctcaacatcgtctacgccgagaccctcgggctcctgcgtgtcgatctgtcctccgtccgagcaggcgctgcgcccttccatgggatcattcccgggaagcgcgtccagcccctcggacaactcgagcttcctgtctgcttcggaacaccctccaacttccgaagggagaccctgacgttcgaggtggtcgggttcagaggaacctaccacgctgtgctgggaagaccgtgctacgcgaagttcatggtcgtccccaactacacctacctgaagctcaagatgtcgggccccaacgggatcatcaccgtcggccccacgtacaaacacgcgttcgaatgcgacgtggagtgcgtggagtacgccgaggccctcgccgagtccgaggccctcatcgccgacctggagagcctctcgaaggaggtgccagacgtgaagcgtcatgccggcaactttgagccagcggagacggttaagtccatccccttcgaccccagcggcgacgcctccaagcagatccggatcggctccgggctcgatcccaaataggaagcagtgctcgtcgactttctccgcgcgaacgccgacgtttttgcgtggagtccctcggacatgcctggcataccgagggatgtcgccgagcactcactggacatccgagccggagcccgacccgtcaagcagcctctgcgccgattcgacgaggagaagcgcagagccataggcgaggagatccacaagctaatggcggcagggttcatcaaagaggtattccatcctgaatggcttgccaaccctgtgcttgtgagaaagaaaggggggaaatggcggatgtgtgtagactacactggtctcaacaaagcatgtccgaaggttccctaccctctgcctcgcatcgatcaaatcgtggattccactgctgggtgcgaaaccctgtctttcctcgatgcctactcagggtatcatcaaatcaggatgaaagagtccgaccagctcgcgacttctttcatcacacccttcggcatgtactgctatgtcaccatgccgttcggcttgaggaatgcgggcgcgacgtaccagcggtgcatgaaccatgtgttcggcgaacacattggccgcacggttgaggcctacgtcgatgacatcgtagtcaagacgaggaaagcttctgacctcctttccgaccttgaagtgacattccgatgtctcaaggcgaaaggcgtcaagctcaatcccgagaagtgtgtcttcggggtgccccgaggcatgctcttggggttcatcgtctccgagcggggcatcgaagccaacccggagaagatcgcagccatcaccagcatggggcccatcaaggacttgaaaggcgtacagagggtcatgggatgtctcgcggctctgagccgcttcatctcacgcctcggcgaaagaggtctacctctgtaccgcctcttgaggaaggccgagtgcttcacttggacccctgaggccgaggaagccctcgggaacttgaaggcgctcctcacaaaggcgcctatcctggtgcccctagctgccggagaagccctcttggtctacgtcgccgcgaccactcaggtggttagcgccgcgattgtggtcgagaggcaagaagaggggcatgcattgcccgttcagaggccagtttacttcgtcagcgaggtactgtccgaaaccaagatctgctacccacaagttcagaagctgctgtatgcagtgatcctgacacggcggaagttgcgacactacttcgagtctcatccggtaaccgtggtgtcatccttccccctgggggagatcatccagtgccgagaggcctcgggtaggattgcaaagtgggcggtggaaatcatgggcgagacaatctcgttcgcccctcggaaggccatcaagtcccaggtcttggcggacttcgtggccgaatgggtcgacacccagctaccgacggctccgatccaaccgaagctctggaccatgttcttcgacgggtcgttgatgaagacgggagccggcgcaggcctactcttcatctcgcccctcgggaaacacatacgctatgtgctacgcctccatttccctgcgtccaacaatgtggctgagtatgaggctctggtcaacgggttgcggatcgccatcgagctaggggtccgacgcctcgacgctcgcggtgactcgcagctcgtcatcgaccaagtcatgaagaactcccactgccgcgacccgaagatggaggcctactgcgatgaggttcggcgcctggaggacaaattctacgggctcgagctcagccacatcgcccggcgctacaacgagactgcggacgagctggctaaaatagcctcggggcgaacaatggttccccggacgtcttctcccgagacctacatcaaccctccatcaagatcgacgacacgcccgagcccaaggcaccctcggcccagcccgaggtaacctcggctcagtccgaggtatcttcggcacggcccgaggcaccctcagcccggcccgagccaccctcggctcagcccgaggcaccctcggcacccgagggtgaggcactgcgcgtcgaggaggagcgaagcggggtcacgcctaatcaaaactggcggaccccgtacctgcaatatctccactgaggagagctacccctcgaccgagccgaggctcggcggttggcgcgacgcgccaagtcgttcgtcttgctgggcgatgagaaggagctctaccaccgtagcccctctggcatcctccagcgatgcatctccatcgccgaaggtcaggaactcctgcgagagatacactcgggggcttgcggccatcacgcagcgcctcgagcccttgtcgggaatgctttccgacaaggcttctactggccgacggcagtggccgacgccactagaattgttcgcacctgcgaagggtgtcagttctacgcaaggcagacccacctgcccgctcaggctctgcagacgatgcccatcacctggccttttgctgtgtggggtctggatctcgtcggccccttgcagaaggcacccgggggctacacgcacctgctggtcgccatcgacaaattctccaagtggatcgaggtccgacccctaaacagcatcaggtccgaacaggcaatggcgttcttcaccaacatcatccatcgcttcggggtcccaaactccatcatcaccgacaacggcacccagttcaccggcagaaagttcctggacttctgcggggatcaccacatccgggtggactaggccgccgtagctcaccccatgtcaaatgggcaagtagagcgtgccaacggcatgattctgcaagggctcagcctcggatctacaatgacctcaacaagttcggcaagcgatggatgaaggaactcccctcggtggtctggagtctgaggacaacgccgagccgaaccacgggcttcacgccgttcttcctagtctacggggtcgaggccgtcttgcccacagacctggaatacggctccccgaggacgagggcctacaccgaccaaagcaaccaagctagccgagaagactcgttggaccagctggaggaggctcgggacaaggccttactacactcagcgcggtaccagcagtccctgcgacgctaccacgcccgaggggtccggtcccgagacctctaggtgggcgacctggtgcttcggctgcgacaagacgcccgagggcggcacaagctcacgccccatccgggggcagcaagagaaccctctctcacgacgtgaagacaacgcgcccgtgctccgttcctcgaacggctcgcgcatgcgcaacggccgccccgccaaccactcgccccgtcgcattaactccgcggcgggacaggcggcgcccctggcaggagaagctggcgacgcttcgccttcgccataatgaccgcgtcaaaaaaggtacgccgcgtcgttcgatttcgtatccttttccttttttcctctttctctctcttgcaacagggaccgggaaagggggataccccgaaaaggatccttccccgtgaaggaactaggctctgagcctctctactgattagaggttcgaaggctggccccccggaagggttcgacagccgcctcagatcgtgtgggccctacacccactactggtcagaggttcgaaggccggcccctcggaagggttccacggccgcctcaggctactcgggctccgcgcccattactgatcaggggttcgaaggctggcccccgaagggttcacagccgcctcaaactccgagcgagggatgaccatgggtacgttcgatacataaccaaggcttgggctgcgctcccgaggtaccctaggacatttccgagaccagcgggaacgatcttgtaacggaatcccatcagagggaggcattgagccctcggaccccgttgccaggggaccgggtccgacagatcacccgcaggtacttttgggcgtgcctctgggcccctagccgacccctaacgaacggggcacggacgtccactcggattaccctcttgcagctcaccagagacaccatgttcggcgcccatcgagggcaacatggcgctttccccccctcctccttgcggaaaggcgacgcaggggcgtatgtaaaaaagccgagtctgtccctgatcgccctctcgccttgtgcggaggctcgggggctgctctcgcaaacccggctccggccgaaccgttgacagcgtcaacataccagcccgagaacttgggacccgaccgtacacccgggctacggccagctcgcatgagggaacgaccagaccagccgaagcattacgcgaggcattaagacctcgaaggagtgaaaccactcctccgaggcctcgggggctacacccggcgggtgcgctcgcgcgcacccaccgaaacaaaacgcaaccgagaaaggctggtccccttgcaaaaaagtgcgacgaaagcctccaagcgagtgctaacactcccttcgaggctcgggggctactgtcggggaccataattaggggtaccctcaaggctcctaattctcagctggtaacccccatcagcacaaagctgcaaaggcctgatgggtgcgattaagtcagggatcattccattcgagggactcgatcacgcctcgcccgagcctagcctcggacaagggcagccgaccccggagggtttccgtctcgcccgaggcccccctccagcggcgaacatatttccggctcgcccgaggccctgtcttcgccaagaagcaaccctgaccaaatcgccgcaccgaccgaccaaatcgcaggagcatttaatgcaaaggtggcctgacacctttatcctgacgcgcgccccccagccggcagagccgaagtgaccgtcgtcacttcgccgctccactgaccggcctgacagaaggacagcgccgcctgcgccactccgactgcggtgccacttgacagagtgagactgacaggcggtcaggccctgccgaaggcaccataggaaactccgcttcgcccgacccagggctcggacacgggctaagtcccggaagacggcgaactccgctccgcccgacccagggctcggactcgggctaagtctcggaagacggcgaactccgctccgcccgacccagggctcggacttgggctaagccctagaagacggcgaactccgctccgcccgaccccagggctcggactccgccctggcctcagccggcggcctccgcctcgcccgacccaggggctcggactcgacctcagccacggaagacagactcgacctcggcttcggaggagctttgatgaggacatcactatgagtacgactacaccagcagcacctccacatcaagcgccacttccttcattagctgggccaatcactcgggcccgtgccagagatcttaacttcgtcatgctactgaagaatgagggcccagaagaatagacgaccagcccaactgcggcccatagtggacgacctagggttggccgcccctaggggctgcgccccctctatttatccaggagctgcgcctcctttattctcgagttttgttttacgttagccttagctactctcgaacgcgcgcaaatctgcgctgtcttcgtgtattcagaactccaccctcgagtaatagattagattgctcgcatctttttcttgttcgttcttcgattgcgcacaggaaacgatcttcgtgatcaggccgatctcgcatcagcaaggtcggtaaccacagggagttggttcagcgattgcattggcgcctcgggcttgctcgtcgtagtcggatcgcaagggtcatcttccgccaaatcggaattatctctactcgccgaaagatcgggcacctcagcttcatcaattggtatcagatttccaggttgatcggtgagtttattgagcgttttttttcctacagtccacaaaaccacattaaaattcaggttagatcttatcccagcaccttttgagcctcgcactttctttccataatctgcattgttgaatttgtgtgctttcgcgtcatttgttgctggttgcattgtgttcttccaccattcaaaccctagcgccgccaccatctcccgtttgatcacgccacaaatcgagtcaacattgtttccttatttttctccttcggttacgtcaaaaaaaaacagaaaaaaacaaaccgagtcaacggccgtttccttgattttctccttcggttacaaaaaaaacagaaaaaaaaacaaaccgagtcaacgaccgcttccttgtttttctccttcggttacataaaaaaaacagaaacaaaaaaaaagaaaacgaaggagaaaggatacggttgtttcatcccggtcgtttttaaaacataacttgaggtaccttccgtaaaccgggcataacttttcgctcgggtgtccaaaaaatctgaaatttttacaggagcttgttgacaccattctgagccctgtttggtttcgacaaaattgtctgtttggtttcgacaaaattatcaaaaaaattcaggaaaataaagaaaaaaattcgtcaaagttctcgcacgcttttcagagaacttcctgattttctatagaccacatctgatatctgttttaggtgaaacttcgtgtagctcctatcttgttgcttcttttgctgagaaaaatatcaaaaaaatcatacaaaaaagaaaaacaaaatcacctgtgttttctactagtgcctttttggcatcactagtacaatatttacggtactgccattctgctagttccatccatcctttgcacctgtggccagcaatatagtttcgtgttttgcactataattcaactttgcattattgtttgatcgtgctaatccttgacttgagtgcagcctacccaaaactccacatatttctacgacgagaaggtttctgtttctctaggcaatcgctcatccaatctttcaccggttccacctgttggttgcagttcaccactgtggcttggtaagaacggataagaacttgataacagcactagtgtgagcgccttgtgagcagtacacccctgtttttggtcgttggtttttttctccttttggtgttttggtgtttgcgctaactatggcaggagcacacgacatggtggatgcccagttgcaggaagtacggggacaagttgatggacttgctgctgacattaggacgatgcatgaacggcttgattcaacgatcacttcgacgaccgagcgtttcaaccaacttgaccttgctcaaacggcgactcgcaccacactcgacaccatcctggcacgccttgatgcattgaccacaaagatggagcaggaatacggcggtgacactgagctggacgatggagatcgccgtggtcgtgcacgtcgtgtggttcgtcatccccctaatgacttattttctaagattaa

SEQ ID NO: 567 - DNA, 889 bp, Zea mays
  source (0)...(0): Zea mays BAC clone full insert sequence contig bacm.pk007.b16.fis1
ccttgatgacctaaagtagtgtattgggcatgttcgttgcgaaaaacgaagaaatagttccggtggcaaaaattcgtgcttttatgcactcgacacccgttttcggaatgggtgacgtgcggaaacgaaatttcgcgaaaccaccccaaacatgagttttggacctaaagtagtggattgggcatgttcgttgcgaaaaacgaagaaatggttccggtggcaaaaactcgtgctttgtatgcaccccgacacccgttttcagaatcggtgacgtgcgacaacgaaattgcgcgaaaccaccccaaacatgagttttggacctaaagtagtggattgggcatgttcgttgcgaaaaacgaaaaatggttccgggggcaaaaactcgtgctctgtatgcaccccaacacccgttttcggaatggatgacgtgcgataacgaaattgcgcgaaaccaccccaaacaagagttttggacctaaagtagtggattgggcatgttcgttgcgaaaaacgaagaaatggttccggtggcaaaaactcgtggttttatgcacccgacacccgttttcggaatgggtgacgtgcgacaacgaaattgcgcgaaaccaccccaaacatgagttttggacctaaagtagtggattgggcatgttcgttgcgaaaaacgaagaaatggttccggtggcaaaaactcgtgcttttatgcacccgacacccgttttcggaatgggtgacatgtgacaacgaaattgcgcgaaaccaccccaaatatgagttttgtacctaaagtagtggattgggcatgttcgttgcgtaaaacgaagaaatggttccggtggcaaaaactcgtgctttgtatgcaccacgacacccgttttatcaaggaaaa

SEQ ID NO: 568 - DNA, 1155 bp, Zea mays
  source (0)...(0): Zea mays BAC clone full insert sequence contig bacm.pk007.b16.fis2
taaactaacgggcgaggtcgaacggtatctacatgcttgatcgggtgcatacaaagcacgagtttttgccaccgaaaccatttcttcattttttgcaacgaacatgcccaatccactactttaggtccaaaactcatgtttggggtggtttctcgcaatttcgttgtcgcacgtcacccattccaaaaacgggtgtcgggtgcatacaaagcacgagtttttgccaccgaaaccatttcttcgtttttcgcaacgaacatgcccaatccactactttaggtccaaaactcatgtttggggtggtttcacgcaaattcgttgccgcacgtcacccattccgaaaacggttgtcgagggtgcatacaaagcacgagtttttgccaccggaaccatttcttcgtttttcgcaacgaacatgcccaatccactactttaggtacaaaactcatgtttggggtggtttgcacaattttgttgtcgcacgtcacccattccgaaaatgggtgtagggggtgcatacaaagcacgagtttttgccaccggaaccatttgttcgtttttcgcaacgaacatgcccaatccactactttaggtccaaaactcatgtttggggtggtttctcgcaatttcgttgtcgcacgtcacccattccgaaaacgggtgtcgggtgcatacaaagcacgagtttttgccactggaacgatttcttcgtttttcgcaacgaacatgcccaatccactactttaggtccaaaactcatgtttggggtggtttcgcgcaatttcgttgtcgcacgtcacccattccgaaaacaggtgtcgggtgcatacaaagcacgagtttttgccaccggaaccatttcttcgtttttcgcaacgaacatgcccaatccactactttaggtcaaaaactcatgtttggggtggtttcgcgcaatttcgttgtcgcacgtcacccattccgaaaacgggtgtcgtggtgcatacaaagcacgagtttttgccaccggaaccatttcttcgttttacgcaacgaacatgcccaatccactactttaggtacaaaactcatgtttaaggtggtttcgcgcaatttcgttgtcacatgtcacccattcatcaaggaggtagataccgtcgacctcgcggtttgtgt

SEQ ID NO: 569 - DNA, 189 bp, Zea mays
  source (0)...(0): Zea mays BAC clone full insert sequence contig bacm.pk007.b16.fis3
ccagcttggtgttgttgatcggcgcgcggatgaaaccgcgctgggtaccatccgggccgatgatcaccaggttgccgctgtggtcgacggtgtagttttccttgctggtgtcagccgggatatagggaatgcttaccgagttggcgaatttctgcagggtcgcctcttcgccagtcagacccttgaagc

SEQ ID NO: 570 - DNA, 1159 bp, Zea mays
  source (0)...(0): Zea mays BAC clone full insert sequence contig bacm.pk007.b16.fis4
gtggcaaaaactcgtgcttttatgcaccccgacaaccgttttcagaatcggtgacgtgcggcaacgaaattgcgcgaaaccaccccaaacatgagttttgtacctaaagtagtggattgggcatgttcgttgcgaaaaacgaagaaatggttccggtggcaaaaactcgtggtttgtatgcacccccgacaaccgttttcagaatgggtgacgcgcggaaacgaaattgcgcgaaaccaccccaaacatgagttttggacctaaagtagtggattgggcatgtttgttatgaaaaacgaagaaatggttccggtggcaaaaactcgtgcttttatgcacccgacacccgttttcagaatgggtgacgtgtgacaacgatattgcgcgaaaccaccccaaacatgagttttgtacctaaagtagtggattgggcatgttcgttgcgaaaaacgaagaaatggttccggtggcaaaaactcgtgctttgtatgcaccccgacacccgttttcagaaagggtgacacgtgacaacgaaattgcgcgaaaacaccccaaacatgagttttgtacctaaagtagtggattgggcatgttcgttgcgaaaaacgaagaaatggttccggtggcaaaaactcgtgctttgtatgcacccccgacacccgttttcggaatgggtgacgtgcgacaacgaaattgcgcgaaaccaccacaaacatgagttttggacctaaagtagtggattgggcatgttcgttgcgaaaaacgaagaaatggttccggtggcaaaaactcgtgcttttatgcactcgacacccgttttcggaatgggtgacgtgtgacaacgaaattgcgcgaaaccaccccaaacatgagttttgtacctaaagtagtggattgggcatgttcgttgcgaaaaacgaagaaatggttccggtggcaaaaactcgtgcttttatgcacccgacactcgttttcggaatgagtgacgtgcggcaacgaaattgcgcgaaaccaccccaaacatgagttttggacctaaagtagtggattgggcttgttcgttgcgaaaaacgaagaaatggtcatcaagcgaagaaataccgtcgacctcccggggttggagtgacccaatcgccctgtaggagtctataccgcgtcg

SEQ ID NO: 571 - DNA, 1625 bp, Zea mays
  source (0)...(0): Zea mays BAC clone full insert sequence contig bacm.pk007.b16.fis5
tctaatcaaaccggcgaggtcgacggtatcgtctaccttgatgcaacgaacatgcccaatccactactttaggtccaaaactcatgtttggggtggtttcgcgcaatttcgttgtcgcacgtcacccattccgaaaacaggtgtcgggtgcatacaaagcacgagtttttgccaccggaaccatttcttcgtttttcgcaacgaacatgcccaatccactactttaggtcaaaaactcatgtttggggtggtttcgcgcaatttcgttgtcgcacgtcacccattccgaaacgggtgtcgtggtgcatacaaagcacgagtttttgccaccggaaccatttcttcgttttacgcaacgaacatgcccaatccactactttaggtacaaaactcatgtttaaggtggtttcgcgcaatttcgttgtcacatgtcacccattccgaaaacgggtgtcgggtgcataaaagcacgagtttttgccaccggaaccatttcttcgtttttcgcaacgaacatgcccaatccactactttaggtacaaaactcatgtttggggtggtttcgcgcaatttcgttgtcacacgtcacccattccgaaaacgggtgtcgagtgcataaaagcacaagtttttgccaccggaaccatttcttcgtttttcgcaaagaacatgcccaatccactactttaagtccaaaactcatgtttggtgtggtttcgcgcaatttcgttgtcgcacgtcacccattccgaaaacgggtgtcgtggtgcatacaaagcacgagtttttgccaccggaaccatttcttcgtttttcgcaacgaacatgcccaatccactactttaggtacaaaactcatgtttggggtggtttcgcgcaatttcgttgtcacacgtcacccattccgaaaacgggtgtcgggtgcataaaagcacgagtttttgccaccggaaccatttcttcctttttcgcaacgcacatgcccaatccactactttaggtccaaaactcatgtttggggtggtttcgcgcaattttgtttccgcacgtcacccattccgaaaacgggtgtcgggtgcataaaaacacgagtttttgccacctgaaccatttcttccttttttgcaacgaaaatgccccatccactactttaggtgcaaaaaacatgtttgggggggtttcgcgcaaattttttgtcgcacgtcacccattccgaaaaaaggtgtcggggggcatacaaaccacaagtttttgccaccggaaccattttttcttttttttcaacaaaaatgccccatcccctacttttggtgcaaaaaacacgtttggggggggttctcgcaaattttttgtcccacgtcaccccttctaaaaacaggggtgggggggataaaaaaacaaatttttttctcccggaaacttttttttttttttttaaccaaaaagccccaaccaccacattttgtgcgcaaaacacgtttgggggggggtttcacaaaaattttgtcgcacgggaccccctctgaaaaaaggtggtggggggggtataaaaaaaaaaattttttgctccaaacaattttttttttttttggccaaaaaacccccccccacattgtggggcaaaa

SEQ ID NO: 572 - DNA, 1518 bp, Zea mays
  source (0)...(0): Zea mays BAC clone full insert sequence contig bacm.pk007.b16.fis6
atccactactttaggtccaaaactcatgtttggggtggtttcgcgcaatttcgttttcgcacgtcacccattccgaaaacgggtgtcgggtgcatataaagcacgagtttttgccaccggaaccatttcttcgtttttcgcaacgaacatgcccaatccactactttaggtccaaaactcatgtttggggtggtttcgcgcaatttcgtttccgcacgtcacccattccgaaaacgggtgtcgggtgcataaaaagcacgagtttttgccaccggaaccatttcttcttttttcgcaacgaacatgcccaatccactactttaggtccaaaactcaagtttggggtggtttcgcgcaatatcgttttcgcacgtcacccattctgaaaaagggtgtcgggggtgcatacaaagcacgagtttttgccaccggaaccatttcttcgtttttcgcaacgaacatgcccaatccactactttaggtccaaaactcatgtttggggtggtttcgcgcaatttcgttgtcgcacgtcacccattccgaaaacgggtgtcgggtgcatacaaagcacggatttttgccaccggaaccatttcttcgtttttcgcaacgaacatgcccaatccactactttaggtccaaaactcatgtttggggtggtttcgcgcaatatcgttgtcgcacgtcacccattccgaaaacgggtgtcgtggtgcatacaaagcacgagtttttgccaccggaaccatttcttcgtttttcgcaacgaacatgcccaatccactactttaggtacaaaactcatgtttggggtggtttcgcgcaatttcgttttcgcacgtcacccattccgaaaacgggtgtcgggtgcatataaagcacaagtttttgcgaccggaaccatttcttcgtttttcgcaacgaacatgcccaatccactactttaggtacaaaactcatgtttgggggtggtttcgcacaatttttttgtcacccgtcacccattctgaaaacgggtgtcggggggttacaaagcacgagtttttgccaccggaaccattttttctttttttgcaaagaacatgcccaatccactactttaggtccaaaaatcatgtttggggtggtttcgcgcaattttgttgtcacacgtcacccattccgaaaacgggtgtcgggtgcatacaaagcacgagtttttgccaccggaaccattttttcgttttttgcaacgaacatgcccaatccactactttaggtccaaaactcatgtttgtggtggtttcgcgcaattttgttgtcgcacgtcacccattccgaaaacggttgtcgggggtgcatacaaagcacgagtttttgccaccggaaccatttcttcgtttttcgcaacgaacatgcccaatccactactttaggtacaaaactcatgtttggggtggtttcgcgcaatttcgttgccgcacgtcaccgattctgaaaacggttgtcggggtgcataaaagcacgagtttttgccac

SEQ ID NO: 573 - DNA, 3156 bp, Zea mays
  source (0)...(0): Zea mays BAC clone full insert sequence contig bacm.pk007.b16.fis7
gagttgtttcagcgattgcattggcgcctcgggcttgctcgtcgtagtcggatcgcaagggtcatcttccgccaaatcgggaattatctctactcgccgaaagatcgggcacttcagcttcatcaagtggattgggcatgttcgttgtgaaaaacgaagaaatcgttccggtggcaaaaactcgtgctttgtatgcaccccgacaaccgttttcagaatgggtgacgtgcggcaacgaaattgcgcgaaaccaccccaaacatgagttttggacctaaagtagtgaattgggcatgttcgttgcgaaaaacgaagaaatggttccggtggcaaagagtcgtgctttgtatgcaccccgacaaccgttttcagaatgagtgacgtgcggcaacgaaattgcgcgaaaccaccccaaacatgagttttggacctaaagtagtggattgggcatgttcgttacgaaaaacgaagaaatggttccggtggcaaaaactcgtgcttttatgcacccgacactcgttttcggaatgagtgacgtgcggcaacgaaattgcgcaaaaccaccccaaacatgagttttgtacctaaagtagtggattgggcatgttcgttgcgaaaaacgaagaaatggttctggtggcaaaaactcgtgctttgtatgcacccgacacccgttttcagaatgggtgacgtgcggcaacgaaattgtgcgaaaccaccccaaacatgagttttggacctaaagtagtggattgggcatgttcgttacgaaaaacgaagaaatggttccggtggctaaaactcgtgcttttatgcacccgacacccgttttcagaatgggtgacgtgtgacaacgaaattgcgcgaaaccaccccaaacatgagttttgtacctaaagtagtggattgggcatgttcgttgcgaaaaatgaagaaatggttccggtggcaaaaactcgtggtttgtatgcacccgacacccgttttcggaatgggtgacgtgcgacaacgaagttgcgcgaaaccaccccaaacatgagttttggacctaaagtagtggattgggcatgttcgttgcgaaaaacgaagaaatggttctggtggcaaaaactcgtgctttgtatgcacccgacacccgttttcagaatgggtgacgtgcggcaacgaaattgtgcgaaaccaccccaaacatgagttttggacctaaagtagtggattgggcatgttcgttacgaaaaacgaagaaatggttccggtggctaaaactcgtgcttttagcacccgacacccgttttcagaatgggtgacgtgtgacaacgaaattgagcgaaaccaccccaaacatgagttttgtacctaaagtagtggattgggcatgttcgttgcgaaaaatgaagaaatggttccggtggcaaaaactcgtggtttgtatgcaccacgacacccgttttcggaatgggtgacatgtgacaacgaaattgcgcaaaaccaccccaaacatgagttttgtacctaaagtagtggattgggcatgttcgttgcgaaaaacgaagaaatggttccggtggcaaaaacttgtgctttgtatgcacccgacacccgttttcggaatgggtgacgtgcgacaacgaaattgcgcgaaaccaccccaaacatgagttttggacctaaagtagtggattgggcatgttcgttgcgaaaaacgaagaaatggttccggtggcaaaaactcgtgctttgtatgcacccgacacccgttttcagaatgggtgacgtgcgacaacgaaattatgcgaaaccaccccaaacatgagttttggacctaaagtaatggattgggcatgttcgttgcgaaaaacgaaaaaatggttccggtggcaaaaactcgtggtttgtatgcaccccaacacctgtttttggaatgggtgacgtgcgacaacgaaattgcgagaaaccaccccaaacatgatttttggacctaaagtaggggattgggcatgttcgttgcaaaaaatgaagaaatggttccggtggcaaaaactcatgctttgtatgcacccgacacccgttttcggaatgggtgacgtgcgacaacgaaattgcgagaaatcaccccaaacatgagttttggacctaaagtagtggattgggcatgttcgttgcgaaaaacgaagaaatggttccggtggcaaaaactcgtgctttgtatgcaccccgacaaccgttttcggaatgggtgacgtgcggcaacgaaattgcgcgaaaccaccccaaacatgagttttggacctaaagtagtggattgggcatgttcgttccgaaaaacgaagaaatggttccggtggcaaaaactcgtgcttttatgcacccgacactcgttttcggaatgagtgacgtgcggcaacgaaattgcgcgaaaccaccccaaacctgagttttgtacctaaagtagtggattgggcatgttcgttgcgaaaaacgaagaaatggttccggtggcaaaaactcgtgctttgtatgcaccccgacacccgttttcggaatgggtgacgtgcgacaacgaaattgcgcgaaaccaccccaaacatgagttttggacctaaagtaatagattgggcatattcattgcgaaaaacgaagaaatggttccggtggcaaaaactcgtgctttgtatgcacccgacacccgttttaggaatgggtgacgtgcgacaacgaaattgtgcgaaaccactccaaacatgaattttggacccaaagtagtggattgggcatgttatttacgaaaaacgaaaaaatggttccggtggcaaaaacccgtgcttttatgcaacctacaaccgttttaggaatgggtgacctgtgacaacaatattgcgcgataccacccccatgattaattttcgaccctaattaatccgattgagcccgttctttgcatagaacaaagaaatgggttcagtgcgcaaaaactctggtattgtggcacactcaatcccgttttcacaaagggtgacgtgccacaaaaaaattgtcgcgaaccccctcaaatctggattgtgaacctaaaccaaaaaaaatcgggctccccttccgaaaaaaaaaaaaatggcttgggggaccaaaatattgggttttatactaaccaaagggccg

SEQ ID NO: 574 - DNA, 1763 bp, Zea mays
  source (0)...(0): Zea mays BAC clone full insert sequence contig bacm.pk007.b16.fis8
ctttaggtccaaaactcatgtttggggtggtttcgcgcaatttcgttgccgcacgtcacccattccgaaaacgggtgtcgggtgcataaaagcacgagtttttgccaccggaaccatttcttcgtttttcgcaacgaacatgcccaatccactactttaggtccaaaactcatgtttggggtggtttcgcgcaatttcgttgtcgcacgtcacccattccgaaaacaggtgtcgggtgcatacaaagcacgaatttttgccaccggaaccatttcttcgtttttcgcaacgaaaatgcccaatccactaccttaggtccaaaactcaagtttggggtggtttcccgcaatttcgttgtcacacgtcacccattccaaaaacgggtgtcggggtgcatacaaagcacgattttttgccaccggaaccatttattctttttacgcaacaaacatgcccaatccactactttaggtacaaaactcatgtttgggggggtttcgcgcaatttcgttgtcacatgtcacccattccgaaaacgggtgtcgggtgcataaaagcacgagtttttgccaccagaaccatttcttcgtttttcgcaacgaacatgcccaatccactactttaggtacaaaactcatgtttggggtggtttcgcgcaatttcgttgtcgcacgtcacccattctgaaaatgggtgtcgtggtgcatacaaaccacgagtttttgccaccggaaccatttcttcgtttttcgcaactaacatgcccaatccactactttaggtacaaaactcatgtttggggtggtttcgcgcaatttcgttgtcgcacgtcacccattccgaaaacgggtgtcgtggtgcatacaaagcacgagtttttgccaccggaaccatttcttcgtttttcgtaacgaacatgcccaatccactactttaggtccaaaactcatgtttggggtggtttcacacaatttcgttgccgcacgtcacccattctgaaaacgggtgtcgggtgcatacaaagcacgagtttttgccaccggaaccatttcttcgttttttcgcaacgaacatgcccaatccactactttatgtccaaaactcatgtttggggtggtttcgcgcaatttcgttgtcgcacgtcacccattccaaaaacgggtgtcgtggtgcatacaaagcacgagtttttgccaccggaaccatttcttcgtttttcgcaacaaaaatgcccaatccactactttaggtccaaaacccaggtttggggtggtttcccgcaatttctttgtcccacgtcccccattccaaaaacgggtgtcggggggcatacaaagcacgagtttttgccaccggaaccattttttcgttttacgcaaaaaaaatgcccaatccactactttaggtccaaaactcatgtttggggtggtttcgcacaatttcgttgccgcacgtcacccattctgaaaacgggtgtcgggtggttacaaagcacgagtttttgccaccggaaccatttcttcgtttttcgcaacgaacatgcccaatccactactttaggtccaaaactcatgtttggggtggtttcgcgcaatttcgttgtcacacgtcacccattccgaaaacgggtgtcgagtacatacaaagcacgagtttttgccaccggaaccatttcttcgtttttcgcaacgaacatgcccaatccactactttaggtccaaaactcatgtttgtggtggtttcgcgcacatatcaagtggaga

SEQ ID NO: 575 - DNA, 2318 bp, Zea mays
  source (0)...(0): Zea mays BAC clone full insert sequence contig bacm.pk007.b16.fis9
tgtgtgtacctaaagtagtggattgggcatgtttgttgcgaaaaacgaagaaatggttccggtggcaaaaactcgtgctttgtatgcacccgacacccgttttcggaatgggtgacgtgcgacaacgaaattgcgagaaaccaccccaaacatgtgttttggacctaaagtagtggattgggcatgttcgttgcgaaaaacgaagaaatggttccggtggcaaaaactcgtgctttgtatgcaccccctacacccattttcggaatgggtgacgtgtgacaacgaaattgcgcgaaaccaccccaaacatgagttttggacctaaagtagtggattgggcatgttcgttgcgaaaaacgaagaaatggttccggtggcaaaaactcgtgctttgtatgcaccctcgacaaccgttttcggaatgggagacgtgcggcaacgaatttgcgcgaaaccaccccaaacatgagttttggacctaaagtagtggattgggcatgttcgttgcgaaaaacgaagaaatggtttcggtggcaaaaactcgtgctttgtatgcacccgacacccgtttttggaatgggtgacgtgcgacaacgaaattgcgagaaaccaccccaaacatgagttttggacctaaagtagtggattgggcatgttcgttgcaaaaaatgaagaaatggttccggtggcaaaaactcatgctttgtatgcacccgacacccgttttcggaatgggtgacgtgcgacaacgaaattgcgagaaatcaccccaaacatgagttttggacctaaagtagtggattgggcatgttcgttgcgaaaaacgaagaaatggttccggtggcaaaaactcgtgctttgtatgcaccccgacaaccgttttcagaatgggtgacgtgcggcaacgaaattgcgcgaaaccaccccaaacatgagttttggacctaaagtagtggattgggcatgttcgttgcgaaaaacgaagaaatggttccggtggcaaaaactcgtgcttttatgcaccccgacaaccgttttcagaatcggtgacgtgcggcaacgaaattgcgcgaaaccaccccaaacatgagttttgtacctaaagtagtggattgggcatgttcgttgcgaaaaacgaagaaatggttccggtggcaaaaactcgtgctttgtatgcaccccccaccacctttttcagaatgggtgacgtgcgacaacaaaattgcgcgaaaccaccacaaacatgatttttggaccaaaagtagtggattgggcatgttcgttgccaaaaacgaagaaatggttccggtggcaaaaactcgtgcttttatgcacccgacacccgttttcggaatgggtgacatgtgacaacgaaattgcgcgaaaccaccgcaaacatgagttttgtacctaaagtagtggattgggcatgttcgttgcgtaaaacgaataaatggttccggtggcaaaaactcgtgctttgtatgcaccacgacacccgttttcggaatgggtgacgtgcgacaacgaaattgcgcgaaaccacccccaacatgagttttggacctaaagtagtggattgggcatgttcgttgcgaaaaacgaagaaatggttccggtggcaaaaactcgtgctttgtatgcacccgacacccgttttcggaatgggtgacgtgcgacaacgaaattgcccaaaaccaccccaaacatgagttttggacctaaagtagtggattgggcatgttcgttacgaaaaacaaaaaaatggttccggtggcaaaaactcgtgcttttatgcaccccgacacccgttttcagaaagggtgacgtgtgacaacgaaattgcgcgaaaccaccccaaacatgagttttgtacctaaagtagtggattgggcatgttcgttgcgaaaaacgaagaaatggttccggtggcaaaaactcgtgcttttatgcactcgacacccgttttcggaatgggtgacgtgtgacaacgaaattgcgcgaaaccaccccaaacatgagttttgtacctaaagtagtggattgggcatgttcgttgccaaaaacgaagaaatggttccggtggcaaaaactcgtgcttttatgcacccgacacccgttttcggaatgggtgacatgtgacaacgaaattgcgcgaaaccaccgcaaacatgagttttgtacctaaagtagtggattgggcatgttcgttgcgtaaaacgaataaatggttccggtggcaaaaactcgtgctttgtatgcaccacgacacccgttttcgaaatgggtgacgtgcgacaacgaaaatcaggggtgta

SEQ ID NO: 576 - DNA, 1181 bp, Zea mays
  source (0)...(0): Zea mays BAC clone full insert sequence contig bacm.pk007.b16.fis10
tccatgttgtgcttgaacattccaatccgagcccgcatctgaccgtggtgaccgtcacaagttggtgttcttctgcagtccgaatccagcatgttcaaatccttttccctttcggtcttctccctgattcctaagcaaaacaagagtgcacgggtctccatggtctaaatatgatggacatgaactcaagagtgtaatcacttgatggttgagttgacgagcacgagcgcgagtaatgggaccagaaattggtacttgtattggtatagatgcatcagtagtgtggatgtcttcatcactcggtttgtggcgtgatcaaatgggagatggtggcggcgctaggatttgaatggtggaagaacacaatgcaaccagcaacaaggaaacgcgaaagcacacaaattcaacaatgcagattattgaaagaaagtgcgaggctcaaaagggtgctgggataagatctaacctgaatttttatgtggttttgtggactgtaggaaaaaaaacgctcgataaactcaccgatcaacctggaaatctgataccaattgatgtagctgaggtgcccgatctttcggcgagtagagataattccgatttggcggaagatgacccttgcgatccgactacgacgagcaagcccgaggcgccaatgcaatcgcttaaccaactccctgtggttaccgaccttgctgatgcgagatcggcctgatcacgaagatcgtttcctgtgcgcaatcgaagaacgaacaagaacaagatgcgagcaatctaatctattactcgagggtggagttctgaatacacgaagacagcgcagatttgcgcgtgttcgagagtagctaaggctaacgtaaaacaaaactcgagaataaaggaggcgcagctcctggataaatagagggggcgcagcccctaggggcggccaaccctaggtcgtccactatgggccgcagttgggctggtcgtctattcttctgggccctcattctttagtagcatgacgaagttaagatctcttgcacgggcccgagtgattggcccagctaatgaaggaagtggcgcttgatgtggaggtgctgctggtgtagtcgtactcatagtgatgtcctcatcagtcgttctccaacaagttttccaccaccatcatctctcatcgaaagatcgggcacccttctacc

SEQ ID NO: 577 - DNA, 3892 bp, Zea mays
  source (0)...(0): Zea mays BAC clone full insert sequence contig bacm.pk007.b16.fis11
cgaaattgcgtgaaaccaccccaaacatgagttttggacctaaagtagtggattgggcatgttcgttgcgaaaaacgaagaaatggttccagtggcaaaaactcgtgcttttatgcactcgacacccgttttcggaatgggtgacgtgcgacaacgaaattgtgcgaaaccaccccaaacatgagttttggacctaaagtagtggattgggcatgttcgttacgaaaaacgaagaaatggttccggtggcaaaaactcgtgctttgtatgcaccccgacaaccgtttttagaatgggtgacgtgcggcaacaaaattgcgtgaaaccaccccaaacatgagttttgtacctaaagtagtggattgggcatgttctttgcgaaaaacaaaaaaatggttccggtggcaaaaactcgtgctttgtatgcccccccaccccctttttcagaatgggtgacgtgcgacaacgaaattgcgtgaaaccaccccaaacatgagttttggacctaaagtagtggattgggcatgttcgttgcgaaaaacgaagaaatggttccggtggcaaaaattcgtgcttttatgcactcgacacccgttttcggaatgggtgacgtgcggaaacgaaattgcgcgaaaccaccccaaacatgagttttggacctaaagtagtggattgggcatgtttgttacgaaaaacgaagaaatggttccggtggcaaaaactcgtgcttttatgcacccgacacacgttttcagaatgggtgacgtgtgacaacgaaattgcgcgaaaccaccccaaacatgagttttgtacctaaagtagtggattaggcatgttcgttgcgaaaaacgaagaaatggttccggtggcaaaaactcgtgctttgtatgcacccgacacccgttttcggaatgggtgacgtgcggcaacgaaattgtgcgaaaccaccccaaacatgagttttggacctaaagtagtggattgggcatgttcgttgcgaaaaacgaagaaatggttccggtggcaaaaactcgtggtttgtatgcaccccgacacccgttttcggaatgggtgacgtgcgacaacgaaattgcgcgaaaccaccccaaacatgagttttggacctaaagtagtggattgggcatgttcgttgcgaaaaacgaagaaatggttccggtggcaaaaactcgtgctttgtatgcacccgacacccgttttcggaatgggtgacgtgcggcaacgaaattgcgcgaaaccaccccaaacatgagttttggacctaaagtagtggattgggcatgttcgttgcgaaaaacgaagaaatggttccggtggcaaaaactcttgctttgtatgcacctgacacccgttttcaaaatgggtgacgtgcgacaacgaaattgtgggaaaccaccccaaacatgagttttggacctaaagtagtggattgggcatgttcgttacgaaaaacgaagaaatggttccggtggcaaaaactcgtgctttgtatgcaccccgacaaccgttttcagaatgggtgacgtgcggtaacaaaattgtgcgaaaccaccccaaacatgagttttgtacctaaagtagtggattgggcatgtccgttgcgaaaaacgaagaaatggttccgatggcaaaaactcgtgctttgtatgcaccccgacacccgttttcggaatgggtgacgtgcgacaacgaaattgcgcgaaaccaccccaaacatgagttttggacctaaagtagtggattgggcatgttcgttgcgaaaaacgaagaaatggttccggtggcaaaaactcgtgcttttatgcactcgacacccgttttcggaatgggtgacgtgcggaaacaaattgcgcgaaaccaccccaaacatgagttttggacctaaaatagtggattgggcatgttcgttgcgaaaaacgaagaaatggttccggtggcaaaaacttgtgcttttatgcacccgacacccgttttcggaatgggtgacatgtgacaacgaaattgcgcgaaaccaccccaaacatgagttttgtacctaaagtagtggattgggcatgttcgttgcgtaaaaagaagaaatggttccggtggcaaaaacttgtgctttgtatgcaccccgacacccgttttcggaatgggtgacgtgcgacaacgaaattgtgcgaaaccaccccaaacatgagttttgtacctaaagtagtggattgggcatgttcgttgcgaaaaacgaagaaatggttccggtggcaaaaactcgtgctttgtatgcacccgacacccgttttcggaatgggtgacgtgcgacaacgaaattgcgcgaaaccaccccaaacatgagttttggacctaaagtagtggattgggcatgttcgttgcgaaaaacgaagaaatggttccggtggcaaaaactcgtgctttgtatgcacccgacacccgttttcagaatgggtgacgtgcggcaacgaaattgtgcgaaaccaccccaaacatgagttttggacctaaagtagtggattgggcatgttcgttgcgaaaaacgaagaaatggttccggtggcaaaaactcgtggtttgtatgcaccccgacacccgttttcggaatgggtgacgtgcgacaacgaaattgcgcgaaaccaccccaaacatgagttttggacctaaagtagtggattgggcatgttcgttgcgaaaaacgaagaaatggttccggtggcaaaaactcgtgctttgtatgcacccgacacctgttttcggaatgggtgacgtgcgacaacgaaattgcgcgaaaccaccccaaacatgagttttggacctaaagtagtggattgggcatgttcgttgcgaaaaacgaagaaatggttccggtggcaaaaactcgtgcttttatgcacccgacacccgttttcggaatgggtgacgtgcggcaacgaaattgcgcgaaaccaccccaaacatgagttttggacctaaagtagtggattgggcatgttcgttgcgaaaaacgaagaaatggttccggtggcaaaaactcgtgcttttatgcacccgacacccgttttcggaatgggtgacgtgcgacaacgaaattgtgcgaaaccatccaaacatgagttttggacctaaagtagtggattgggcatgttcgttacgaaaaacgaagaaatggttccggtggcaaaaactcgtgctttgtatgcaccccgacaaccgttttcagaatgggtgacgtgcggtaacaaaattgtgcgaaaccaccccaaacatgagttttgtacctaaagtagtggattgggcatgtccgttgcgaaaaacgaagaaatggttccggtggcaaaaactcgtgctttgtatgcaccccgacacccgttttcggaatgggtgacgtgcgacaacgaaattgcgcgaaaccaccccaaacatgagttttggacctaaagtagtggattgggcatgttcgttgcgaaaaacgaagaaatggttccggtggcaaaaactcgtgcttttatgcactcgacacccgttttcggaatgggtgacgtgcggaaacgaaattgcgcgaaaccaccccaaacatgagttttggacctaaaatagtggaattggcatgttcgttgtgaaaaacgaagaaatggttccggtggcaaaaacttgtgctttgtatgcaccccgacaaccgttttcagaatcggtgacgtgcggcaacgaaattgcgcgaaaccaccccaaacatgagttttgtacctaaagtagtgaattgggcatgttcgttgcgaaaaacgaagaaatggttccggtggcaaaaactcgtgcttttatgcacccgacacccgttttcggaatgggtgacgtgcgacaacgaaattgtgcgaaacca

SEQ ID NO: 578 - DNA, 3833 bp, Zea mays
  source (0)...(0): Zea mays BAC clone full insert sequence contig bacm.pk007.b16.fis12
gccagtgattctgaggaaactagtcatgctatgattgccactaaccatgcagaaaatgaggaagtccacgttgatcccatcgacgccgataggtatgagagtcttgttgtgcagcgtgttctcagcacacaggttgcccaggccgaaaaaaatcagcgacacactctattccataccaagggcgtcgtgcacgaacggtcgattcgcatcatcatcgatagtggcagctgcaacaatttggcaagtatagcgttggtagagaaattatccttgcccactcgcacacatccacatccgtatcacattcaatggcttaatgatggtggtaaaataaaggtaacacgttcggtacatgtccccttttcgctgggttcttattctgattatgctgattgcgatgttattcctatggaagcatgctctttgttattgggtcgaccttggcaatatgatactgatagtttacatcatggtcgttcaaatcattattctttcatgtttaaaggccagaaaataattatacatccaatgacccctgaccaaattttgaaagatgatcttactagggctgctaaaactgcacaacaagtcaaatcgacatcagccgcacctattaaatctgaaatcaagttgcactctcctgttttacttgctacacgtgctgattttgatgatctccatgaagctcatatgccctgttatgcacttgtatgctcgcgcatgcttgttccgcttgatgatgcaccgtctttggatataccccctgctgttgttaaccttttgcaggagtatgctgatgtttatcctacggaattaccaccgggtcttcctcccctccgtggcattgagcatcagatcgatctcatccccggcgcttctcttccgaaccgcgccccgtaccgtacaaatccagaggagacgaaggagatccagcgccaggtgcagacgcttcttgataagggttacattcgtgagtctcttagcccttgctcggttcctgttttactcgttccaaagaaagatgggtcatggcgtatgtgcgtagattgtcgtgctattaataacatcacagttcgttatcgatatcctattccacgccttgatgatatgttagatgagcttagtggtgccgttattttctctaaggttgatttgcgtagcggttaccatcagattagaatgaaactcggtgatgaatggaaaacggcttttaaaacgaaatttggtttatatgaatggttggttatgccatttggattgactaatgctcccagcacctttatgcgtttaatgaacgaagttctacgggccttcataggtttgtttgttgttgtttatttcgatgatatccttatttatagcaagtctatagaggagcatttagaacatttgcatgctgtttttgatgctttgcgtgctgctcgcttgtttggtaacatggaaaagtgcacattttgcacgcaacgtgtctcgtttcttggttatgtggttactccgcagggcattgaggtggatagcagcaagattgctgccattcgggagtggcctacaccgacgacggtcacacaaattcggagctttcttggacttgccggtttctaccgcagatttgttcgtgattttagctccattgcagcgcctctacatgagcttacaaagaaagatgtgccgtttgcttggagtgattcgcaggaggtagcgttcagcactttgaaagataagttaacccaagctcccctcttgcaattgcctaattttaataaagtttttgagcttgaatgcgatgctagcggtattgggctaggtgctgttttgttacaagaaggaaaaccagttgcttattttagtgaaaaattaagcggtgctagtctgaaatattctacttatgataaagagctttacgctttagtgcgcactttgcatacatggcagcactatctttggcatcgtgcgttcataattcattctgatcatgaggctttaaaacatattcgtacccaaacaaatctgaaccgtcgtcatgctaaatgggtcgaattcattgagtcctttccttacattattaaacacaagaacgcgaaggacaatgttattgctgatgctttgtctcgtataccatgctgtcacaattagattttaaaatctttggtttggacactgtgaaggatcaatatgttgacgatgctgattttaaagatgctttcggccattgtattaatgggataccatggggcaaatttcacatacaagatgggttcttgtttcgcgctaacaagttgtgtgttccagctagttcggtttgtcttttgttgttacaggaggcacatggaggcggtctcatggggcattttggcgtctacaaaacgcatgaggtgttggctgcccacttcttttggcctcggatgcgcgctgatgttgagcgccttgttgcacgctgcactacttgtcagaaagctaagtcacggttgaacaaccatggtttgtatatgcctttgcctgtcccttcttctccttggcttgatatctctatggactttgttttgagcttgcctagaactaagaaggggagggatagtatttttgtggttgttgatagattctctaaaatggctcactttataccttgtcataaaactgatgatgctagcattgttgttgaattgttctttagagaaattattcgtttacatggtattccaaaaacaatagtctctgatcgcgatgctaagtttctaagccatttttggagatctctttggaataaattgggaactaaattgttgtttagcactacttgtcaccctcagactgatggacaaactgaggtagtaaatagaactttatctaccatgcttagggctgttttagacaagaatttgagacgttgggaggattgcttgcctcatgttgaatttgcttacaatcatgccacgcattcttctacaaagatgtgccctttccagattgtttatggttacattcctagggcacctattgatttgatttcacttaatgctgcgaacgccccacatgtagatgcttctgcacatgttgaacaaatgattaccatacatgaacaaacgaaacagaacattgctgctactaatgcaaaaaatcaggttgctggtagtaaaggaagaaaacatgttacttttgaacctggtgatatgtttggttgcatttgagaaaggatcgttttcctacttttgcgtcgttctaaattaatgcctcgtgctgctggtccttttaaggtgctaacaaagattaatgataatgcttatatccttgacctgcctgcggaatttggtgtttccactagttttaatgttgcagatttgaaaccatatatggccgaggatgaggagttgtcgtcgaggacgacttcacttcaagaaggggaggatgatgaggacatcactatgagtacgactacaccagcagcacctccacatccaagcgccacttccttcattagctgggccaatcactcgggcccgtgccagagatcttaacttcgtcatgctactgaagaatgagggcccagaagaatagacgaccagcccaactgcggcccatagtggacgacctagggttggccgcccctaggggctgcgccccctctatttatccaggagctgcgcctcctttattctcgagttttgttttatgttagccttagctactctcgaacacgcgcaaatctgcgctgtcttcgtgtattcagaactccaccctcgagtaatagattagattgctcgcatcttgttcttgttcgttcttcgattgcgcacaggaaacgatcttcgtgatcaggccgatctcgcatcagcaag

SEQ ID NO: 579 - DNA, 2978 bp, Zea mays
  source (0)...(0): Zea mays BAC clone full insert sequence contig bacm.pk007.b16.fis13
tctaaatccaaagcgggaggtcgacggtatcttctccttgatcgcgcaatttcgttgtcgcacgtcacccattccgaaaacaggtgtcgggtgcatacaaagcacgagtttttgccaccggaaccatttcttcgtttttcgcaacgaacatgcccaatccactactttaggtccaatactcatgtctggggtggtttcgcgcaatttcgttgtcgcgcgtcacccattccgaaaacgggtgtcgtggtgcatacaaagcacgagtttttgccaccggaaccatttattcgttttacgcaacgaacatgcccaatccactactttaggtacaaaactcatgtttgcggtggtttcgcgcaatttcgttgtcacatgtcacccattccgaaaacgggtgtcgggtgcataaaagcacgagtttttgccaccggaaccatttcttcgtttttcgcaacgaacatgcccaatccactactttaggtacaaaactcatgtctggggtggtttcgcgcaatttcgttgtcacatgtcacccattccgaaaacgggtgtcgggtgcataaaagcacgagtttttgccaccagagccatttcttcgtttttcgcaacgagcatgcccaatccactattttaggtccaaaactcatgtttggggtggtttcgcgcaatttcgttttcgcacgtcacccattccgaaaacgggtgtcgggtgcatataaagcacgagtttttgccaccggaacaatttcttcgtttttcgtaacgaacatgcgcaatccactactttaggtccaaaactcatgtttggggtggtttcgcgcaatttcgtttccgcacgtcacccattccgaaaacgggtgtcgggggtgcatacaaagcacgagtttttgccaccggaaccatttcttcgtttttcgcaaagaacatgcccaatccactactttaggtccaaaactcatgtttggggtggtttcgcgcaatttcgttgtcgcacgtcacccattccgaaaacgggtgtcgggtgcatacaaagcacggatttttgccaccggaaccatttcttcgtttttcgcaacgaacatgcccaatccactactttaggtccaaaactcatgtttggggtggtttcgcgcaatatcgttgtcgcacgtcacccattccgaaaacgggtgtcgtggtgcatacaaagcacgagtttttgccaccggaaccatttcttcgtttttcgcaacgaacatgcccaatccactactttaggtacaaaactcatgtttggggtggtttcgcgcaatttcgttgtcacacgtcacccattctgaaaacgggtgtcgggtgcataaaagcacgagttttagccaccggaaccatttcttcgtttttcgtaacgaacatgcccaatccacaactttaggtccaaaactcatgtttggggtggtttcgcgcaatttcgttgtcgcacgtcacccattccgaaaacgggtgtcggggtgcatacaaagcacgagtttttgccaccggaaccatttcttcgtttttcgcaacgaacatgcccaatccactactttaggtacaaaactcatgtttggggtggtttcgcgcaattttgttgccgcacgtcactcattccgaaaacgattgtcgggtgcataaaagcacgagtttttgccaccggaaccatttcttcgttttttcgtaacgaacatgcccaatccactactttaggtccaaaactcatgtttggggtggtttcgcacaatttcgttgtcacacgtcacccattccaaaaacgggtgtcgggtgcatacaaagcacgagtttttgccaccagaaccatttctttgtttttcgcaacgaacatgcccaatccactactttaggtccaaaactcatgtttggggtggtttctcgcaatttcgttgtcgcacgtcacccattccgaaaacgggtgtcgggtgcatacaaagcacgagtttttgccactggaaccatttcttcgtttttcgcaacgaacatgcccaatccactactttaggtccaaaactcatgtttggggtggtttcgtgcaatttcattgtcgcacgtcacccattccgaaaacgggtgtcgggtgcatacaaaccacgagtttttgccaccggaaccatttattcgtttttcgcaacgaacatgcccaatccactactttaggtccaaaactcatgtttggggtggtttcgcgcaatttcgttgccgcacgtcatccattccgaaaacggttgtcgggggtgcatacaaagcacgagtttttgccaccggaaccatttcttcgttttcctcaacgaacatgcccaatccactactttaggtacaaaactcatgtttggggtggtttcacgcaatttcgttgtcacacgtcacccattccgaaaacgggtgtcgggtgcatacaaagcacgagtttttgccagcagaaccatttcttcgtttttcgcaacgaacatgcccaatccactactttaggtccaaaactcatgtttggggtggtttctcgcaatttcgttgtcgcacgtcacccattccgaaaacgggtgtcgggtgcataaaagcacgagtttttgccaccggaaccatttcttcgtttttcacaacgaacatgcccaatccactactttaggtacaaaactcatgtttggggtgtgatgaggacatcaacaccaacacgagcacatctacaccagcagcagcttctccagcccaggcaccatcttccccagtccaggcgccaccccttccacctgggccagtgactcgggcccgtgcaagagaattgaactacatcatgttgttaaagaacgaaggcccggaagaatagacgaccagcccaattgcggcccataatggacgacctagggttggccgcccctaggggctgcgccccctctctatttatacaggagctgcgccctcctttattttccaagttttgttttacattagct

SEQ ID NO: 580 - DNA, 3889 bp, Zea mays
  source (0)...(0): Zea mays BAC clone full insert sequence contig bacm.pk007.b16.fis14
tgaccgcgtatagactcctatagggcgaattgggttcaaatccaccgggggaggtcgacggtatcttttccttgatttctgaaaacgggtgtcgggtgcataaaagcacgagtttttgccaccggaaccatttcttcgtttttcgtaacgaacatgcccaatccactactttaggtccaaaactcatgtttggggtggtttcgcgcaatttcgttgtcgcacgtcacccattccgaaaacgggtgtcgggtgcatacaaagcacgagtttttgccaccggaaccatttcttcgtttttcgcaacgaacatgcccaatccactactttaggtccaaaactcatgttgggggtggtttcgcgcaatttcgttgtcgcacgtcacccattccgaaaacgggtgtcgtggtgcatacaaagcacgagtttttgccaccggaacaatttcttcgtttttctcaacgaacatgcccaatccactactttaggtacaaaactcatgtttggggtggtttcgcgcaatttcgttgtcacacgtcacccattccgaaaacgggtgtcgggtgcataaaagcacgagtttttgccaccggaaacatttcttcttttttctcaacgaacatgcgccatcccctactttttgtgtacaaaacacgtttggggggggttcgcgcaatttcgttgccgcacgtcacccattccgaaaacggttgtcggggtgcatacaaagcatgagtttttgccaccggaaccatttcttcgtttttcgaaagaacatgcccaatccactactttaggtccaaaactcatgtttggggtgatttcttgcaatttcgttgtcgcacgtcacccattccgaaaacgtgtgtcgggtgcatacaaagcacgagtttttgccaccggaaccgtttcttcattttttgcaacgaacatgcccaatccactactttaggtccaaaactcatgtttggggtggtttctcgcaatttcgttgtcgcacgtcacccattccaaaaacgggtgtcgggtgcatacaaagcacgagtttttgccaccgaaaccattttttcgttttttgcaacgaacatgcccaatccactactttaggtccaaaactcatgtttggggtggtttcgcgcaaattcgttgccgcacgtcacccattccgaaaacggttgtcgagggtgcatacaaagcacgagtttttgccaccggaaccatttcttcgtttttcgcaacgaacatgcccaatccactactttaggtacaaaactcatgtttggggtggtttcgcgcaatttcgttgtcacacgtcacccattccgaaaacgggtgtaggggggtgcatacaaagcacgagtttttgccaccggaaccatttcttcgtttttcgtaacgaacatgcccaatccactactttaggtccaaaactcatgtttggggtggtttcgcgcaatttcgttgtcgcacgtcacccattccgaaaacgggtgtcgggtgcatacaaaccacagatttttgccaccggaaccatttcttcgtttttcgcaacgaacatgcccaatccactactttaggtacaaaactcatgtttggggtggtttcgcgcaatttcgttgtcgcacgtcacccattccgaaaacgggtgtcgtggtgcatacaaagcacgagtttttgccaccggaaccatttcttcgtttttcgcaacgaacatgcccaatccactaatttaggtacaaaactcatgtttggggtggtttcgcgcaatttcgttgtcacacgtcacccattccgaaaacgggtgtggggtgcataaaagcacaagtttttgccaccggaaccatttcttcgtttttcgcaacgaacatgcccaatccactactttaggtccaaaactcatgtttggggtggtttcgcgcaatttcgttgtcgcacgtcacccattccgaaaacgggtgtcgtggtgcatacaaagcacgagtttttgccaccggaaccatttcttcgtttttcgcaacgaacatgcccaatccactactttaggtacaaaactcatgtttggggtggtttcgcgcaatttcgttgtcacacgtcacccattctgaaaacgggtgtcgggtgcataaaagcacgagtttttgccaccggaaccatttcttcgtttttcgtaacgaacatgcccaatccactactttaggtccaaaactcatgtttggggtggtttcgcacaatttcgttgccgcacgtcacccattctgaaaacgggtgtcgggtggttacaaagcacgagtttttgccaccggaaccatttcttcgtttttcgcaacgaacatgcccaatccactactttaggtccaaaactcatgtttggggtggtttcgcgcaatttcgttgtcgcacgtcacccattccgaaaacgggtgtcgagtacatacaaagcacgagtttttgccaccggaaccatttcttcgtttttcgcaacgaacatgcccaatccactactttaggtccaaaactcatgtttggggtggtttcgcgcaatttcgttgtcgcacgtcacccattccgaaaacgggtgtcggggtgcatacaagcacgagtttttgccaccggaacaatttcttcgttttacgcaacgaacatgcccaatccactactttaggtacaaaactcatgtttggggtggtttcgcgcaatttcgttgtcccatgtcacccattccgaaaacgggtgtcgggtgcataaaagcacgagtttttgccaccggaaccatttctttgtttttcgcaacgaacatgcccaatccactactttaggtccaaaactcatgtttggggtggtttcgcgcaatttcgttgtcgcacgtcacccattccgaaaacgggtgtcggggtgcatacaaaccacgagtttttgccaccggaaccatttcttcgtttttcgcaacgaacatgcccaatccactactttaggtccaaaactcatgtgtggggtggtttcgcgcaattttgttgtcgcgcgtcacccattctgaaaacgggtgtcgtggtgcatacaaagcacgagtttttgccaccggaaccatttattcgttttacgcaacgaacatgcccaatccactactttaggtacaaaactcatgtttaaggtggtttcgcgcaatttcgttgtcacatgtcacccattccgaaaacgggtgtcgggtgcataaaagcacgagtttttgccaccggaaccatttcttcgtttttcgcaacgaacatgcccaatccactactttaggtacaaaactcatgtttggggtggtttcgcgcaatttcgttgtcacatgtcacccattccgaaaacgggtgtcgggtgcataaaagcacgagtttttgccaccggaaccatttcttcgtttttcgcaacgaaaatgcccaatccactactttaggtacaaaactcatgtttggggtggtttcgcgcaatttcgttgtcacacgtcacccattctgaaaacgggtgtcgggtgcataaaaacacgaatttttttcccccgaaacattttttttttttttttaacaaacatgtcccatccactactttaggtccaaaaatcatgtttggggtggtttcgcgcaatttcgttttcgcacgtcacccattccgaaaacaggtgtcgagtgcataaaaacacgaatttttttcccccgaaaaaatttttcttttttttcaacgaacaagccccaaccactacttttgggccaaaaaacacgtttgggggggtttctcccaaaattcttgtctcacgtcgcccctttccaaaaaaggtgttggggggggaacaaagccaaagtttttgcacccgaaaaatttttttttttttttaaaaagaaagcccaaatccaaa

SEQ ID NO: 581 - DNA, 4111 bp, Zea mays
  source (0)...(0): Zea mays BAC clone full insert sequence contig bacm.pk007.b16.fis15
tcaaatcaacaacgggaggtcgacggtatcgatttcctgatcaaaactcatgtttggggtggtttcgcgcaatttcgttgtcgcacgtcacccattccgaaaacgggtgtcgtggtgcatacaaagcacgagtttttgccaccggaaccatttcttcgttttacgcaacgaacatgcccagtccactactttaggtacaaaactcatgtttggggtggtttcgcgcaatttcgttgtcacatgtcacccattccgaaaacgggtgtcgggtgcataaaagcacgagtttttgccaccggaaccatttctttgtttttcgcaacgaacatgcccaatccactactttaggtccaaaactcatgtttggggtggtttcgcgcaatttcgttgtcgcacgtcacccattccgaaaacgggtgtcggggtgcatacaaaccacgagtttttgccaccggaaccatttcttcgtttttcgcaacgaacatgcccaatccactactttaggtccaaaactcatgtttggggtggtttcgcacaatttcgttgtcacacgtcacccattctgaaaacgggtgtcgggtgcatacaaagcacgagtttttgccaccggaaccatttcttcgtttttcgcaacgaacatgcccaatccactactttaggtccaaaactcatgtttggggtggtttcgcgcaatttcgttgtcgcacgtcacccattctgaaaacgggtgtcgggtgcatacaaagcacgagtttttgccaccggaaccatttttttgttttttgcaacgaacatgcccaatccactactttaggtacaaaactcatgtttgggggggtttcgcgcaattttgttgtcgcacgtcacccattccgaaaacgggtgtcggggtgcatacaaagcacgagtttttgccaccggaaccatttcttcgtttttcgcaacgaacatgcccaatccactactttaggtacaaaactcatgtttggggtggtttcgcgcaatttcgttgtcgcacgtcacccattccgaaaacgggtgtcgtggtgcatacaaagcacaagtttttgccaccggaaccatttcttcgttttacgcaacgaacatgcccaatccactactttaggtacaaaactcatgtttggggtggttttgcgcaatttcgttgtcacatgtcacccattccgaaaacgggtgtcgggtgcataaaagcacgagtttttgccaccggaaccatttcttcgtttttcgcaacgcacatgcccaatccactactttaggtccaaaactcatgtttggggtggtttcgcgcaatttcgtttccgcacgtcacccattccgaaaacgggtgtcgagtgcataaaagcacgagtttttgccacctgaaccatttcttcgtttttcgcaacgaacatgcccaatccactactttaggtcctaaactcatgtttggggtggtttcgcgcaattttgttgtcgcacgtcacccattccgaaaacgggtgtcgtggtgcatacaaaccacgagtttttgccaccggaaccatttcttcatttttcgcaacgaacatgcccaatccactactttaggtacaaaactcatgtttggggtggtttcgctcaatttcgttgtcacacgtcacccattctgaaaacgggtgtcgggtgcataaaagcacgagttttagccaccggaaccatttcttcgtttttcgtaacgaacatgcccaatccactactttaggtccaaaactcatgtttggggtggtttcgcacaatttcgttgccgcacgtcacccattctgaaaacgggtgtcgggtgcatacaaagcacgagtttttgccaccagaaccatttcttcgtttttcgcaacgaacatgcccaatccactactttaggtccaaaactcatgtttggggtggtttcgcgcaacttcgttgtcgcacgtcacccattccgaaaacgggtgtcgggtgcatacaaagcacgagtttttgccaccggaaccatttcttcgtttttcgcaacgaacatgcccaatccactactttaggtccaaaactcatgtttggggtggtttcgcgcaatttcgttgtcgcacgtcacccattccgaaaacgggtgtcggggtgcatacaaaccacgagtttttgccaccggaaccattcccccttttttcgcaacaaacatgcccaatccactactttaggtccaaaactcatgtttggggtggtttcgcacaatttcgttgccgcacgtcacccattctaaaaacgggtgtcgggtgcatacaaagcacgagtttttgccaccggaaccatttcttcgtttttcgcaacgaacatgcccaatccactactttaggtacaaaactcatgtttggggtggtttcgcgcaatttcgttgtcacacgtcacccattccgaaaatgggtgtagggggtgcatacaaagcacgagtttttgccaccggaaccatttcttcgtttttcgcaacgaacatgcccaatccactactttaggtccaaaacacatgtttggggtggtttctcgcaatttcgttgtcgcacgtcacccattccgaaaacgggtgtcgggtgcatacaaagcacgagtttttgccaccggaaccatttcttcgtttttcgcaacaaacatgcccaatccactactttaggtacaacactcatgtttggggtggtttcgcgcaatttcgttgccgcacgtcacccattccgaaaacgggtgtcgggtgcataaaagcacgagtttttgccaccggaaccatttcttcgtttttcgcaacgaacatgcccaatccactactttaggtccaaaactcatgtttggggtggtttcgcgcaatttcggtgccgcacgtcacccattctgaaaacagttgtcggggtgcatacaaagcacgagtttttgccaccagaaccatttcttcgtttttcgcaacgaacatgcccaatccactactttaggtacaaaactcatgtttggggtggtttcgcgcaatttcgttgccgcacgtcactcattccgaaaacgagtgtcgggtgcataaaagcacgagtttttgccaccggaaccatttcttcgtttttcgtaacgaacatgcccaatccactactttaggtccaaaactcatgtttggggtggtttcgcgcaatttcgttgccgcacgtcactcattctgaaaacggttgtcggggtgcatacaaagcacgagtttttgccaccggaaccatttcttcgtttttcgcaacgaacatgcccaattcactactttaggtccaaaactcatgtttggggtggtttcgcgcaatttcgttgccgcacgtcacccattctgaaaacggttgtcggggtgcatacaaagcacgagtttttgccaccggaacgatttcttcgtttttcacaacgaacatgcccaatccacttgatgaagctgaggtgcccgatctttcggcgagtagagataattccgatttggcggaagatgacccttgcgatccgactacgacgagcaagcccgaggcgccaatgcaatcgctgaaccaactccctatggttaccgaccttgctgatgcgagatcggcctgatcacgaagatcgtttcctgtgcgcaatcgaagaacgaacaagaaaaagaagcgagcaatctaatctattactcgagggtggagttctgaatacacaaagacagcgcagatttgcgcgtgttcgagagtagctaaggctaacgtaaaacaaaactcggaaaataaaggaggcgcagctcctgaataaatagagagggggcgcagcccctaggggcggccaaccctaggtcgtccattatgggccgcaattgggctggtcgtctattcttccgggccttcgttctttaacaacatgatgtagttcaattctcttgcacgggcccgagtcactggcccaggtggaaggggtggcgcctgggctggagaaggtgctgctggtgtagatgttctcgtgttggtgttgatgtccgcatcatcctccccttcttgaactgaagtcgtcctcgacggcaactcctcatcttctcccgcatacggtttcaaatctgcaatcaaggtggtga

SEQ ID NO: 582 - DNA, 2657 bp, Zea mays
  source (0)...(0): Zea mays BAC clone full insert sequence contig bacm.pk007.b16.fis16
gaaaataagtcattagggggatgacgaaccacacggcgtgcacgaccacggcgatctccatcgtcccactcagtgtcaccgccgtagtcctgctccatctttgtggtcaacgcatcaaggcgtgccaggatggagtcgagtgtggtgcgagtcgccgtttgagcaaggtcaagctggttgaaacgctcggtcgtcgaagtgaccgttgaatcaagccgttcatgcatcgtcctaatgtcatcagcaagtccatcaacttgtccctttacttccagcaactgggcatccaccgtgtcatgtgctcctgccatagttagcgcaaacaccaaaacaccaaaaaacgacaaaaacaggggtgtactgctcacaaggcgctcacactagtgctgttatcaaattcttatccgttcttaccaagccacagtggtgaactgcaaccaacaggtggaaccggtgaaagattggatgagcgattgcctggagaaacagaaacctactcgtcgtagaaatatgtggagttctgggtaggctgcactcaagtcaaggattagcacgaccaaacaataatgcaaagttgaattatagtgcaaaacacgaaactatattgctggccacaagtgcaaaggacggatggaactagtagaatggtagtaccgtaaatattgtactagcgaggccactagtaggaatcacaagtgattttgtttttcttttttgtatgatttttttgatatttttctcagcacaagaagcaacaaaataggagctacacgaagtttcacctaaaacagagttcaaatgtggtctacagaaaatcaggaagttctctgaaaagcgtgcgagaactttgacaaatttttttctttattttcctgaatttttttgacaattttgtcgaacccaaacagaccgaaggtaagtttggccggcctcagaatggtgtcaactagctcctgtaaaaatttcagatttttcggacacccgagcgaaaagttatgcccggtttaaggaaggtacctcaagttatgttttcaaacgaccgggatgaaacaaccgtatcctttctccttcgttgttttttttgtttctgttttttttttgacgtaaccgaaggagaaaaacaaggaaacgatgttgcctcggtttttttctgtttttttttcgtaaccgaaggagaaaaacaaggaaacgaccgttgactcggtttgttttttctgtttttttttgacgtaaccgaaggagaaaaacaaggaaacaatgttgactcggtttgtggcgtgatcaaaggggagatggtggcggcgctaggatttgaatggtggaagaacacaatgcaaccagcaacaaatgacgcgaaagcacacaaattcaacaatgcagattattgaaagaaagtgcgaggctcaaaagggtgctgggataaggtctaacctgaatttttatgtggttttgtggactgtaggaaaaaaaacactcgataaactcaccgatcaacctggaaatctgataccaattgatgtagctgaggtgcccgatctttcggcgagtagagataattccgatttggcggaagttgacccttgcgatccgactacgacgagcaagcccgaggcgccaatgcaatcgctgaaccaactccctgtggttaccgaccttgctgatgcgagatcggcctgatcacgaagatcgtttcctgtgcgcaatcgaagaacgaacaagaaaaagatgcgagcaatctaatctattactcgagggtggagttctgaatacacgaagacagcgcagatttgcgcgtgttcgagagtagctaaagctaatgtaaaacaaaactcggaaaataaaggaggcgcagctcctgtataaatagagagggggcgcagcccctaggggcggccaaccctaggtcgtccattatgggccgcaattgggctggtcgtctattcttccgggccttcgttctttaacaacatgatgtagttcaattctcttgcacgggcccgagtcactggcccaggtggaaggggtggcgcctggactggggaagatggtgcctgggctggagaagctgctgctggtgtagatgtgctcgtgttggtgttgatgtcctcatcacaccccaaacatgagttttgtacctaaagtagtggattgggcatgttcgttgtgaaaaacgaagaaatggttccggtggcaaaaatttgtgtttttatgcactcgacacccgtttttcgaatgggtgacgtgcggaaaagaaattttgggaaacccccccaaacatgagttttggacctaaagtagtggattgggcatgtttgttgggaaaaaagaagaaatggttcccgtggcaaaaaatcgtgctttgtatgcaccccgacacccgttttcagaatgggtgacgtgcgacaacgaaattgcgcgaaaccaccccaaacatgagttttggacctaaagtagtggattgggcatgttcgttgcgaaaaacgaaaaatggttccggtggcaaaaactcgtgctctgtatgcaccccgacacccgttttcggaatggatgacgtgcgataacgaaattgcgcgaaaccaccccaaacaagagttttggacctaaagtagtggattgggcatgttcgttgcgtaaaacgaagaaatggttccggtggc

SEQ ID NO: 583 - DNA, 6740 bp, Zea mays
  source (0)...(0): Zea mays BAC clone full insert sequence contig bacm.pk007.b16.fis17
cattctgaaaacgggtgtcgggtgcatacaaagcacgagtttttgccaccggaaccatttcttcgttttttcgcaacgaacatgcccaatccactactttatgtccaaaactcatgtttggggtggtttcgcgcaatttcgttgtcgcacgtcacccattccgaaaacgggtgtcgggtgcatacaaagcacaagtttttgccaccggaaccatttcttcgtttttcgcaacgaacatgcccaatccactactttaggtccaaaactcatgtttggggtggtttcgcgcaattttgttttcccacgtcacccattccaaaaacgggtgtcggggtgcatacaaagcacgagtttttgccaccggaaccattttttcttttttcgcaacgaacatgcccaatccactattttaggtacaaaactcatgtttggggtggtttcgcgcaattttgttgtcacacgtcacccattccaaaaaggggtgtcgggtgcataaaagcacgagtttttgccaccggaaccatttttttgttttttgcaacgaacatgcccaatccactactttaggtccaaaactcatgtttggggtggtttcgcgcaatttcgttgtcgcacgtcacccattctgaaaacgggtgtcgtggtgcatacaaagcacgagtttttgccaccggaaccatttcttcgtttttcgcaacgaacatgcccaatccactactttaggtacaaaactcatgtttggggtggtttcgcgcaatttcgttgtcacacgtcacccattctgaaaacgggtgtcgggtgcataaaagcacgagtttttgccaccggaaccatttcttcgtttttcgtaacgaacatgcccaatccactacattaggtacaaaactcatgtttggggtggtttcacgcaatttcgttgtcacacgtcacccattccgaaaacgggtgtcgggtgcataaaagcacgagtttttgccaccggaaccatttcttcgtttttcgtaacgaacatgcccaatccactactttaggtccaaaactcatgtttggggtggtttagcgcaatttcgttgtcgcacgtcacccattccgaaaacggttgtcgtggtgcatacaaaccacgagtttttgccaccggaaccatttcttcgtttttcgcaacgaacatgcccaatccactactttaggtacaaaaatcatgtttggggtggtttcgcgcaatttcgttgtgacacgtcacccattccgaaaacgggtgtcaggtgcataaaagcacgagtttttgccaccggaaccatttcttcgtttttcgcaacgaaaatgccccatccactactttaagtccaaaactcatgtttggggtggtttcgcgcaatttcgtttccgcacgtcacccattccgaaaacgggtgtcgggggtgcatacaaagcacgagtttttgccaccggaaccatttcttcatttttcgcaacgaacatgcccaatccactactttaggtccaaaactcatgtttggggtggtttagcgcaatttcgttgtcgcacgtcacccattccgaaaacgggtgtcgtggtgcatacaaaccacgagtttttgcgaccggaaccatttcttcgtttttcgcaacgaacatgcccaatccactactttaggtccaaaactcatgtttgtggtggtttcgcgcaatttcgttgtcgcacgtcacccattccgaaaacggttgtcgggggtgcatacaaagcacgattttttgccaccggaaccatttcttcgtttttcgcaacgaacatgcccaatccactactttaggtccaaaactcatgtttggggtggtttcgcgcaatttcgttgccgcacgtcaccctttcaaaaaacgggtgtggggtgcataaaagcacgagtttttgccaccggaaccatttcttcgtttttcgcaacgaacatgcccaatccactactttaggtccaaaactcatgtttggggtggtttcgcgcaatttcgttgtcgcacgtcacccattccgaaaacaggtgtcgggtgcatacaaagcacgagtttttgccaccggaaccatttcttcgtttttcgcaacgaacatgcccaatccactactttaggtccaatactcatgtctggggtggtttcgcgcaatttcgttgtcgcgcgtcacccattccgaaaacgggtgtcgtggtgcatacaaagcacgagtttttgccaccggaaccatttattcgttttacgcaacgaacatgcccaatccactactttaggtacaaaactcatgtttgcggtggtttcgcgcaatttcgttgtcacatgtcacccattccgaaaacgggtgtcggggtgcataaaagcacgagtttttgccaccggaaccatttcttcgtttttcgcaacgaacatgcccaatccactactttaggtccaaaactcatgtttggggtggtttcgcgcaatttcgtttccgcacgtcacccattccgaaaacgggtgtcgggtgcatataaagcacgagtttttgccaccggaaccatttcttcgtttttcgcaacgaacatgcccaatccactactttaggtccaaaactcatgtttggggtggtttcgcgcaatttcgtttccgcacgtcacccattccgaaaacgggtgtcgggggtgcatacaaagcacgagtttttgccaccggaaccatttcttcatttttcgcaacgaacatgcccaatccactactttaggtccaaaactcatgtttggggtggtttagcgcaatttcgttgtcgcacgtcacccattccgaaaacgggtgtcgtggtgcatacaaaccacgagtttttgcgaccggaaccatttcttcgtttttcgcaacgaacatgcccaatccactactttggttcaaaaactcatgtttggggtggtttcgcgcaatttcgttgtcgcacgtcacccattctgaaaacggttgtcgggggtgcatacaaagcacgagtttttgccaccggaaccatttcttcgtttttcgcaacgaacatgcccaatccactactttaggtccaaaactcatgtttggggtggtttcgcgcaatttcgttgtcgcacgtcacccattccgaaaacgggtgtcgggtgcatacaaagcacgagtttttgccaccggaaccatttcttcgtttttcgcaacgaacatgcccaatccactactttaggtacaaaactcatgtttggggtggtttcgcgcaatttcgttgtcgcacgtcacccattccgaaaacgggtgtcgtggtgcatacaaagcacaagtttttgccaccggaaccatttcttcgttttacgcaacgaacatgcccaatccactactttaggtacaaaactcatgtttggggtggttttgcgcaatttcgttgtcacatgtcacccattccgaaaacgggtgtcgggtgcataaaagcacgagtttttgccaccggaaccatttcttcgtttttcgcaacgcacatgcccaatccactactttaggtccaaaactcatgtttggggtggtttcgcgcaatttcgtttccgcacgtcacccattccgaaaacgggtgtcgagtgcataaaagcacgagtttttgccaccggaaccatttcttcgtttttcgcaacgaacatgcccaatccactactttaggtccaaaactcatgtttggggtggtttcgcgcaatttcgttgtcgcacgtcacccattccgaaaacgggtgtcgtggtgcatacaaagcacgagtttttgccaccggaaccatttcttcgttttacgcaacgaacatgcccaatccactactttaggtacaaaactcatatttggggtggtttcgcgcaatttcgttgtcacatgtcacccattccgaaaacgggtgtcgggtgcataaaagcacgagtttttgccaccggaaccatttcttcgttttacgcaacgaacatgcccaatccactactttaggtccaaaactcttgtttggggtggtttcgcgcaatttcgttatcgcacgtcatccattccgaaaacgggtgtcggggtgcatacagagcacgagtttttgccaccggaaccatttttcgtttttcgcaacgaacatgcccaatccactactttaggtccaaaactcatgtttggggtggtttcgcgcaatttcgttgtcgcacgtcacccattctgaaaacgggtgtcggggtgcatacaaagcacgagtttttgccaccggaaccatttcttcgtttttcgcaacgaacatgcccaatccactactttaggtccaaaactcatgtttggggtggtttcgcgaaatttcgtttccgcacgtcacccattccgaaaacgggtgtcgagtgcataaaagcacgaatttttgccaccggaactattttttcgtttttcgcaacgaacatgcccaatccactactttaggtccaaaactcatgtttggggtggtttcgcgcaatttcgttgtcgcacgtcacccattcccaaaacgggtgtcggggtgcatacaaagcacgagtttttgccaccggaaccatttcttcgtttttcgcaacggacatgcccaatccactactttaggtacaaaactcatgtttggggtggtttcgcacaattttggttgccgcacgtcacccattccgaaaaaagggtgtcgggtgcataaaaagcacgagtttttgccaccggaaccatttcttcgtttttcgcaacggacatgcccaatccactactttaggtacaaaactcatgtttggggtggtttcgcacaattttgttgcctcacgtcacccattctgaaaacggttgtcggggtgcatacaaagcacgagtttttgccaccggaaccatttgttcgtttttcgtaacgaacatgcccaatccactactttaggtccaaaactcatgtttggggtggtttcgcacaatttcgttgtcgcacgtcacccattccgaaaacgggtgtcgggtgcatacaaagcacgagtttttgccaccggaacgatttcttcgtttttcgcaacgaacatgcccaatccactactttaggtacaaaactcaggtttggggtggtttcgcgcaatttcgttgccgcacgtcactcattccgaaaacgagtgtcgggtgcataaaagcacgagtttttgccaccggaaccatttcttcgtttttcggaacgaacatgcccaatccactactttaggtccaaaactcatgtttggggtggtttcgcgcaatttcgttgccgcacgtcacccattccgaaaacggttgtcggggtgcatacaaagcacgagtttttgccaccggaaccatttcttcgtttttcgcaacgaacatgcccaatccactactttaggtccaaaactcatgtttggggtgatttctcgcaatttcgttgtcgcacgtcacccattccgaaaacgggtgtcgggtgcatacaaagcatgagtttttgccaccggaaccatttcttcattttttgcaacgaacatgcccaatccactactttaggtccaaaactcatgtttggggtggtttctcgcaatttcgttgtcgcacgtcacccattccaaaaacgggtgtcgggtgcatacaaagcacgagtttttgccaccgaaaccatttcttcgtttttcgcaacgaacatgcccaatccactactttaggtccaaaactcatgtttggggtggtttcgcgcaaattcgttgccgcacgtctcccattccgaaaacggttgtcgagggtgcatacaaagcacgagtttttgccaccggaaccatttcttcgtttttcgcaacgaacatgcccaatccactactttaggtacaaaactcatgtttggggtggtttcgcgcaatttcgttgtcacacgtcacccattccgaaaacgggtgtaggggtgcatacaaagcacgagtttttgccaccggaaccatttcttcgtttttcgcaacgaacatgcccaatccactactttaggtccaaaacacatgtttggggtggtttctcgcaatttcgttgtcgcacgtcacccattccgaaaacgggtgtcgggtgcataaaagcacgagtttttgccaccggaaccatttcttcgtttttcgcaacgaacatgcccaatccactactttaggtccaaaactcatgtttggggtggtttcgcgcaatttcgttttcgcacgtcacccattccgaaaacgggtgtcgggtgcatataaagcacgagtttttgcgaccggaaccatttcttcgtttttcgcaacgaacatgcccaatccactactttaggtacaaaactcatgttagggggtggtttcgcgcaatttcgttgtcacccgtcacccattccgaaaacgggtgtcgggtgcataaaagcacgagtttttgccaccggaaccatttcttcgtttttcgcaacgcacatgcccaatccactactttaggtccaaaactcatgtttggggtggtttcgcgcaatttcgtttccgcacgtcacccattccgaaaacgggtgtcgggtgcataaaagcacgagtttttgccacctgaaccatttcttcgtttttcgcaacgaacatgcccaatccactactttaggtccaaaactcatgtttggggtggtttcgcgcaatttcgatcaaggagaagataccgtcgacctccccggtttgatttggacccattcgcccgatagtgagtctatacgccgtcg

SEQ ID NO: 584 - DNA, 6837 bp, Zea mays
  source (0)...(0): Zea mays BAC clone full insert sequence contig bacm.pk007.b16.fis18
  misc_feature (1)...(6837): n = A,T,C or G
atcaagtctactttcatatggatccggaattatagtcatatctgttctgaggccgccgtaatcacccattccgaaaacgggtgtcgtggtgcatacaaagcacgagtttttgccaccggaaccatttattcgttttacgcaacgaacatgcccaatccactactttaggtacaaaactcatgtttgcggtggtttcgcgcaatttttttttctcatgtcacccattcctaaaacgggtgtcggggtgcttaaaagcacgagtttttgccaccggaaccatttctttgtttttcgcaacgaacttgcccaatcccctacttttggtccaaaactcatgtttgggggggtttcgcgcaatttcgttgtcgcacgtcacccattcagaaaacgggtgtcgggtgcatacaaagcacgggtttttgccaccggaaccattttttcgtttttcgcaacgaacatgcccaatccactactttaggtccaaaactcatgtttggggtggtttcgcgcaatttcgttgtcgcacgtcacccattccgaaaaggggtgtcgggtgcatacaaagcacggatttttgccaccggaaccatttcttcgtttttcgcaacgaacatgcccaatccactactttaggtccaaaactcatgtttggggtggtttcgcgaaatttcgtttccgcacgtcacccattccgaaaacgggtgtcgagtgcataaaagcacgaatttttgccaccggaaccatttcttcgtttttcgcaacgaacatgcccaatccactactttaggtccaaaactcatgtttggggtggtttcgcgcaatttcgttgtcgcacgtcacccattcccaaaacgggtgtcgggggtgcatacaaagcacggatttttgccaccggaaccatttcttcgtttttcgcaacgaacatgcccaatccactactttaggtccaaaactcatgtttggggtggtttcgcgcaatttcgttgtcgcacgtcacccattccgaaaacgggtgtcgggtgcatacaaagcacggatttttgccaccggaaccatttcttcgtttttcgcaacgaacatgcccaatccactactttaggtccaaaactcatgtttggggtggtttcgcgcaatatcgttgtcgcacgtcacccattccgaaaacgggtgtcggggtgcatacaaagcacgagtttttgccaccggaaccatttcttcttttttcgcaacaaaaatgcccaatccactactttaggtacaaaactcatgtttgggggggtttcgcgcaatttctttgtcacacgtcacccattccaaaaacgggtgtcgagggcataaaaacacaagtttttgccacccgaaacatttttttttttttgcaacgaaaatgcccaatccactactttaggtccaaaaatcatgtttggggtggtttcgcgcaatttcgttgtcgcacgtcacccattccgaaaacgggtgtcgtggtgcatacaaagcacgagtttttgccacgggaaccatttcttcatttttcgcaaggaacatgcccaatccattactttgggtacaaaactcatgttgggggtggtttcgcgcaatttggttgtcacacgtcaccctttctgaaaacgggtgtcgggtgcataaaagcacgagttttagccactggaaccattttttcgtttttcgcaacgcacatgcccaatccactactttaggtccaaaactcatgtttggggtggtttcgcacaatttcgttgccgcacgtcacccattctgaaaacgggtgtcgggtgcatacaaagcacgagtttttgccacctgaaccatttcttcgtttttcgcaacgaacatgcccaatccactactttaggtcctaaactcatgtttggggtggtttcgcgcaatttcgttgtcgcacgtcacccattccgaaaacgggtgtcgtggtgcatacaaaccacgagtttttgccaccggaaccatttcttcatttttcgcaacgaacatgcccaatccactactttaggtacaaaactcatgtttggggtggtttcgcgcaatttcgttgtcacacgtcacccattctgaaaacgggtgtcgggtgcataaaagcacgagttttagccaccggaaccatttcttcgtttttcgtaacgaacatgcccaatccactactttaggtccaaaactcatgtttggggtggtttcgcacaatttcgttgccgcacgtcacccattctgaaaacgggtgtcaggtgcatacaaagcacgagtttttgccaccagaaccatttcttcgtttttcgcaacgaacatgcccaatccactactttaggtccaaaactcatgtttggggtggtttcgcgcaacttcgttgccgcacgtcacccattccgaaaacgggtgtcgggtgcatacaaagcacgagtttttgccaccggaaccatttcttcgtttttcgcaacgaacatgcccaatccactactttaggtccaaaactcatgtttggggtggtttcgcgcaatttcgttgtcgcacgtcacccattccgaaaacgggtgtcggggtgcatacaaaccacgagtttttgccaccggaaccatttcttcgtttttcgcaacgaacatgcccaatccactactttaggtccaaaactcatgtttggggtggtttcgcacaatttcgttgccgcacgtcacccattctgaaaacgggtgtcgggtgcatacaaagcacgagtttttgccaccggaaccatttcttcgtttttcgcaacgaacatgcccaatccactactttaggtccaaaactcatgtttggggtggtttcgcgcaatttcgttgtcgcacgtcacccattccgaaaacgggtgtcgggtgcatacaaagcacgagtttttgccaccggaaccatttcttcgtttttcgcaacgaacatggccaatccactactttaggtccaaaactcatgtttggggtggtttcgcgcaatttcgttgtcgcacgtcacccattccgaaaacgggtgtcgtggtgcatacaaagcacgagtttttgccaccggaaccatttcttcatttttcgcaacgaacatgcccaatccactactttaggtacaaaactcatgtttggggtgttttcgcgcaatttcgttgtcacatgtcacccattccgaaaacgggtgtcgggtgcataaaagcacgagttttagccactggaaccattttttcgtttttcgcaacgaaaatgcccaatccactactttaggtccaaaactcatgtttggggtggtttcgcacaatttcgttgccgcacgtcacccattctgaaaacgggtgtcgggtgcatacaaagcacgagtttttgccacctgaaccatttcttcgtttttcgcaacgaacatgcccaatccactactttaggtcctaaactcatgtttggggtggtttcgcgcaatttcgttgtcgcacgtcacccattccgaaaacgggtgtcgggtgcataaaagcacgagtttttgccaccggaaccatttcttcgtttttcgcaacgaacatgcccaatccactactttaggtccaaaactcatgtttggggtggtttcgcgcaatttcgttgccgcacgtcacccattccgaaaacgggtgtcgggtgcataaaagcacgagtttttgccaccggaaccatttcttcgtttttcgcaacgaacatgcccaatccactacattaggtacaaaactcatgtttggggtggtttcacgcaatttcgttgtcacacgtcacccattccgaaaacgggtgtcgggtgcataaaagcacgagtttttgccaccggaaccatttcttcgtttttcgtaacgaacatgcccaatccactactttaggtccaaatctcatgtttggggtggtttcgcacaatttcgttgccgcacgtcacccattctgaaaacgggtgtcgggtgcatacaaagaaagagtttttgccaccggaaccatttcttcggttttcgcaacgaacatgcccaatccactactttaggtccaaaactcatgtttggggtggtttcgcgcaatttcgttgtcgcacgtcacccattcagaaaaggggtgtcgggtgcatacaaagcacggtttttcgccaccggaaccttttctttttttttcgcaaagaacacgcccaatccactactttaggtccaaaactcatgtttggggtggtttcgcgcaatttcgttgtcgcacgtcacctccgaaaacgggtgtcgggtgcatacaaagcacggatttttgccaccggaaccatttcttcgtttttcgcaacgaacatgcccaatccactactttaggtccaaaactcatgtttggggtggtttcgcgcaatatcgttgtcgcacgtcacccattccgaaaacgggtgtcgtggtgcatacaaagcacgagtttttgccaccggaaccatttcttcgtttttcgcaacgaacatgcccaatccactactttaggtacaaaactcatgtttggggtggtttcgcgcaatttcgttgtcgcacgtcacccattccgaaaacgggtgtcggggtgcatacaaaccacgagtttttgccaccggaaccatttcttcgtttttcgcaacgaacatgcccaatccactactttaggtccaaaactcatgtttggggtggtttcgcataatttcgttgtcgcacgtcacccattctgaaaacgggtgtcgggtgcatacaaagcacgagtttttgccaccggaaccatttcttcgtttttcgcaacgaacatgcccaatccactactttaggtccaaaactcatgtttggggtggtttcgcgcaatttcgttgtcgcacgtcacccattccgaaaacgggtgtcgggtgcatacaaagcacgagtttttgccaccggaaccatttcttcgtttttcgcaacgaacatggccaatccactactttaggtccaaaactcatgtttggggtggtttcgcgcaatttcgttgtcgcacgtcacccattccgaaaacgggtgtcgtggtgcatacaaagcacgagtttttgccaccggaaccatttcttcatttttcgcaacgaacatgcccaatccactactttaggtacaaaactcatgtttggggtggtttcgcgcaatttcgttgtcacacgtcacccattctgaaaacgggtgtcgggtgcataaaagcacgagttttagccaccggaaccatttcttcgtttttcgcaactaacatgcccaatccactactttaggtccaaaactcatgtttggagtggtttcgcacaatttcgttgtcgcacgtcacccattcctaaaacgggtgtcgtggtgcatacaagcacgagtttttgccaccggaaccatttcttcgtttttcgcaatgatatgcccaatctactactttaggtacaaaactcatgtttggggtggtttcgcgcaatttcgttgtcacatgtcacccattccgaaaacgggtgtcgggtgcataaaagcacgagtttttgccaccggaaccatttcttcgtttttcgcaacgaacatgcccaatccactactttaggtccaaaactcttgtttggggtggtttcgcgcaatttcgttatcgcacgtcatccattccgaaaacgggtgtcggggtgcatacagagcacgagtttttgccaccggaaccatttttcgtttttcgcaacgaacatgccaaattcactactttaggtacaaaactcatgtttggggtggtttcgcgcaatttcgttgccgcacgtcaccgattctgaaaacggttgtcgggtgcatacaaagcacgagtttttgccaccggaaccatttcttcgtttttcgcaacgaacatgcccaatccactactttaggtccaaaactcatgtttggggtggtttcgcgaaatttcgtttccgcacgtcacccattccgaaaacgggtgtcgagtgcataaaagcacgagtttttgccaccggaaccatttcttcgtttttcgcaacgaacatgcccaatccactactttaggtccaaaactcatgtttgtggtggtttcgcgcaatttcgttgtcgcacgtcacccattccgaaaacggttgtcgggggtgcatacaaagcacgagtttttgccaccggaaccatttcttcgtttttcgcaacgaacatgcccaatccactactttaggtccaaaactcatgtttggggtggtttcgcgcaatttcgttgccgcacgtcaccgattctgaaaacggttgtcggggtgcataaaagcacgagtttttgccaccggaaccatttcttcgtttttcgcaacgaacatgcccaatccactactttaggtccaaaactcatgtttggggtggtttcgcgcaatatcgttgtcgcacgtcacccattccgaaaacgggtgtcgggtgcatacaaagcacggatttttgccaccggaaccatttcttcgtttttcgcaacgaaaatgcccaatccactactttaggtccaaaactcatgtttggggtggtttcgcgcaatttctttgtcgcacgtcacccattccgaaaacgggtgtcgggggcaaacaaagcacggatttttgccaccggaacacttcttcttttttcgcaacaaacagaggccaacacacaatgtagggcccaaaaaacangttaggagggggtatcccgaaattttgttgccgcaagtcaccaattccaaaaaagggtggtcgggggaaaaaaaaaacaaattttttgcaacggaaacatctgttctgtttgtccaacgagagaggcccgcacccacaccacgagggcaa

SEQ ID NO: 585 - DNA, 7017 bp, Zea mays
  source (0)...(0): Zea mays BAC clone full insert sequence contig bacm.pk007.b16.fis19
  misc_feature (1)...(7017): n = A,T,C or G
ggaaaaagaagaaagggtccgtggccaaaattgtgtttttagcccccgacacccctttcgaaatggggagtgcggaaacaaaattgtgggaaccaccccaaacatgagttttggcctaaaatagtggaattggcatgttgtttgaaaaaagaagaaatgttccggtggcaaaaacttgtgctttgtatgcaccccgacaaccgttttcagaatgggtgacgtgcggcaacgaaattgcgcgaaaccaccccaaacatgagttttgtacctaaagtagtgaattgggcatgttcgttgcgaaaaacgaagaaatggttccggtggcaaaaactcgtaatttgtatgcaccccgacacccgttttcggaatggatgacgtgcgataacgaaattgcgcgaaaccaccccaaacaagagttttggacctaaagtagtggattgggcatgttcgttgcgaaaaacgaagaaatggttccggtggcaaaaactcgtgcttttatgcacccgacacctgtttttggaatgggtgacatgtgacaacgaaattgtgcgaaaccaccccaaacatgagttttgtacctaaagtagtggattgggcatgttcgttgcgtaaaacgaagaaatggttccggtggcaaaaactcgtgctttgtatgcaccacgacacccgttttcggaatgggtgacgtgcgacaacgaaattgcgcgaaaccaccccaaacatgagtttttgacctaaagtagtggattgggcatgttcgttgcgaaaaacgaagaaatggttccggtggcaaaaactcgtgctttgtatgcacccgacacctgttttcggaatgggtgacgtgcgacaacgaaattgcgcgaaaccaccccaaacatgagttttggacctaaagtagtggattgggcatgttcgttgcgaaaaacgaagaaatcgttccagtggcaaaaactcgtgctttgtatgcacccgacacccgttttcggaatgggtgacgtgcgacaacgaaattgtgcgaaaccaccccaaacatgagttttggacctaaagtagtggattgggcatgttcgttacgaaaaacgaacaaatggttccggtggcaaaaactcgtgctttgtatgcaccccgacaaccgttttcagaatgggtgacgtgcggcaacaaaattgtgcgaaaccaccccaaacatgagttttgtacctaaagtagtggattgggcatgtccgttgcgaaaaacgaagaaatggttccggtggcaaaaactcgtgctttgtatgcaccccgacacccgttttcggaatgggtgacgtgcgacaacgaaattgcgtgaaaccaccccaaacatgagttttggacctaaagtagtggattgggcatgttcgttgcgaaaaacgaagaaatggttccggtggcaaaaattcgtgcttttatgcactcgacacccgttttcggaatgggtgacgtgcggaaacgaaattgcgcgaaaccaccccaaacatgagttttggacctaaagtagtggattgggcatgtttgttacgaaaaacgaagaaatggttccggtggcaaaaactcgtgcttttatgcacccgacacacgttttcagaatgggtgacgtgtgacaacgaaattgcgcgaaaccaccccaaacatgagttttgtacctaaagtagtggattaggcatgttcgttgcgaaaaacgaagaaatggttccggtggcaaaaactcgtgcttttatgcacccgacacccgttttcggaatgggtgacatgtgacaacgaaattgcgcgaaaccaccccaaacatgagttttgtacctaaagtagtggattgggcatgttcgttgcgaaaaacgaagaaatggttccggtggcaaaaactcgtgcttttatgcacccgacacccgttttcggaatgggtgacatgtgacaacgaaattgcacgaaaccaccttaaacatgagttttgtacctaaagtagtggattgggcatgttcgttgcgtaaaacgaagaaatggttccggtggcaaaaactcgtgctttgtatgcaccacgacacccgtttcggaatgggtgacgtgcgacaacgaaattgcgcgaaaccaccccaaacatgagtttttgacctaaagtagtggattgggcatgttcgttgcgataaacgaagaaatggttccggtggcaaaaactcgtgctttgtatgcacccgacacctgttttcggaatgggtgacgtgcgacaacgaaattgcgcgaaaccaccccaaacatgagttttggacctaaagtagtggattgggcatgttcgttgcgaaaaacgaagaaatggttccggtcgcaaaaactcgtggtttgtatgcaccacgacacccgttttcggaatgggtgacgtgcgacaacgaaattgcgctaaaccaccccaaacatgagttttggacctaaagtagtggattgggcatgttcgttgcgaaaaatgaagaaatggttccggtggcaaaaactcgtgctttgtatgcacccccgacacccgttttcggaatgggtgacgtgcggaaacgaaattgcgcgaaaccaccccaaacatgagttttggacctaaagtagtggattgggcatgttcgttgcgaaaaacgaagaaatggttccggtggcaaaaactcgtgctttatatgcacccgacacccgttttcggaatgggtgacgtgcggaaacgaaattgcgcgaaaccaccccaaacatgagttttggacctaaagtagtggattgggcatgttcgttgcgaaaaacgaagaaatggttccggtggcaaaaactcgtgctttatatgcacccgacacccgttttcggaatgggtgacgtgcgaaaacgaaattgcgcgaaaccaccccaaacatgagttttggacctaaagtagtggattgggcatgttcgttgcgaaaaacgaagaaatggttctggtggcaaaaactcgtgctttgtatgcacccgacacccgttttcagaatgggtgacgtgcggcaacgaaattgtgcgaaaccaccccaaacatgagttttggacctaaagtagtggattgggcatgttcgttacgaaaaacgaagaaatggttccagtggctaaaactcgtgcttttatgcacccgacacccgttttcagaatgggtgacgtgtgacaacgaaattgcgcgaaaccaccccaaacatgagttttgtacctaaagtagtggattgggcatgttcgttgcgaaaaatgaagaaatggttccggtggcaaaaactcgtggtttgtatgcaccacgacacccgttttcggaatgggtgacgtgcgacaacgaaattgcgcgaaaccaccccaaacatgagttttggacctaaagtagtggattgggcatgttcgttgcgaaaaacgaagaaatggttcaggtggcaaaaactcgtgcttttatgcacccgacacccgttttcggaatgggtgacgtgcggaaacgaaattgcgcgaaaccaccccaaacatgagttttggacctaaagtagtggattgggcatgtgcgttgcgaaaaacaaagaaatggttccggtggcaaaaactcgtgcttttatgcacccgacacccgttttcggaatgggtgacgtgtgacaacgaaattgcgcgaaaccaccccccaacatgagttttgtacctaaagtagtggattgggcatgttcgttgcgaaaaacgaagaaatggttccggtggcaaaaactcgtgctttgtatgcaccccgacaaccattttcggaatgggtgacgtgcggcaacgaaattgcgcgaaaccaccccaaacatgagttttggacctaaagtagtggattgggcatgttcgttacgaaaaacgaagaaatggttccggtggcaaaaactcgtgcttttatgcacccgacattcgtgtttggaatgagtagtgacgtgctgcaacgaaattgcgcgaaaccaccccaaacatgagttttgtacctaaagtagtggattgggcatgttcgttgcgaaaaacgaagaaatggttccggtggcaaaaactggtgctttgtatgcaccccgacaactattttcagaatgggtgacgtgtggcaacgaaattgcgcgaaaccaccccaaacatgagttttggacctaaagtagtggattgggcatgttcgttgcgaaaaacgaagaaatggttccggtggcaaaaactcgtgcttttatgcacccgacacccgttttcggaatgggtgacgtgcgacaacgaaattgcgcgaaaccaccccaaacatgtgtttcggacctaaagtagtggattgggcatgttcgttgcgaaaaacgaagaaatggttccggtggcaaaaactcgtgctttgtatgcacccccctacacccgttttcggaatgggtgacgtgcgacaacgaaattgcgcgaaaccaccccaaacatgagttttgtacctaaagtagtggattgggcatgttcgttgagaaaaacgaagaaatggttccggtggcaaaaactcgtgtttttatgcactcgacacccgttttcggaatgggtgacgtgtgacaacgaaattgcgcgaaaccaccccaaacatgagttttgtacctaaagtagtggattgggcatgttcgttgcgaaaaacgaagaaatggttccggtggcaaaaactcgtgcttttatgcacccgacactcgttttcggaatgagtgacgtgcggcaacgaaattgcgcgaaaccaccccaaacatgagttttggacctaaagtagtggattgggcttgttcgttgcgaaaaacgaagaaatggttccggtggcaaaaattcgtgctttgtatgcacccgacacctgttttcggaatgggtgacgtgcgacaacgaaattgcgtgaaaccaccccaaacatgagttttggacctaaagtagtggattgggcatgttcgttgcgaaaaacgaagaaatggttccggtggcaaaaactcgtgctttgtatgcacccgacacccgttttcggaatgggtgacgtgcgacaaccaaattgtgcgaaaccacccaaacatgagttttggacctaaagtagtggattgggcatattcgttacgaaaaacgaagaaatggttccggtggcaaaaactcgtgctttgtatgcaccccgacaaccgttttcagaatgggtgacgtgcggcaacaaaattgtgcgaaaccaccccaaacatgagttttgtacctaaagtagtggattgggcatgtccgttgcgaaaaacgaagaaatggttccggtggcaaaaactcgtgctttgtatgcaccccgacacccgttttgggaatgggtgacgtgcgacaacgaaattgcgcgaaaccaccccaaacatgagttttggacctaaagtagtggattgggcatgttcgttgcgaaaaacgaagaaatggttccggtggcaaaaattcgtgcttttatgcactcgacacccgttttcggaatgggtgacgtgcggaaacgaaatttcgcgaaaccaccccaaacatgagttttggacctaaagtagtggattgggcatgttcgttgcgaaaaacgaagaaatggttccggtggcaaaaatccgtgctttgtatgcacccgacacccgttttcggaatgggtgacgtgcgacaacgaaattgcgcgaaaccaccccaaacatgagttttggacctaaagtagtggattgggcatgttcgttgcgaaaaacgaagaaatggttccggtggcaaaaatccgtgctttgtatgcacccgacacccgttttcggaatgggtgacgtgcgacaacgatattgcgcgaaaccaccccaaacatgagttttggacctaaagtagtggattgggcatgttcgttgcgaaaaacgaagaaatggttccggtggcaaaaactcgtgcttttatgcaccccgacaaccgttttcagaatcggtgacgtgcggcaacgaaattgcgcgaaaccaccccaaacatgagttttgtacctaaagtagtggattgggcatgttcgttgcgaaaaacgaagaaatggttccggtggcaaaaactcgtgctttgtatgcacccccgacaaccgttttcggaatgggtgacgtgcgacaacgaaattgcgcgaaaccaccacaaacatgagttttggacctaaagtagtggattgggcatgttcgttgcgaaaaacgaagaaatggttccggtcgcaaaaactcgtggtttgtatgcaccacgacacccgttttcggaatgggtgacgtgcgacaacgaaattgcgctaaaccaccccaaacatgagttttggacctaaagtagtggattgggcatgttcgttgcaaaaaacgaagaaatggttcaggtggcaaaaactcgtgcttttatgcacccgacacccgttttcggaatgggtgacgtgcggaaacgaaattgcgcgaaaccaccccaaacatgagttttggacctaaagtagtggattgggcatgttcgttgcgtaaaacgaagaaatggttccggtggcaaaaactcgtgctttgtatgcaccacgacacccgttttcggaatgggtgacgtgcgacaacgaaattgcgcgaaaccacccgggacatgagttttgtacctaaagtantgaattgggcatgttcgttgcgaaaaacaaaaaaatggttccggtggcaaaaactcgtgctttgtatgcaccccacaccccttttcngaatgggtgacgtgcgaaaacgaatttgcgcgaaaccccccccaacannaattttggacccaaagtactggattggggcagttcctcgcaaaaaacaaaaaaatggctcccggtgggaaaaacccttgcttttgtaggcccccgaaacccccttttcagaaggggggaggcgcgagaaccgatattctggggaaacccctccaaccnatagttttggaccataatgaatcccattgggggagctttccgtgcacaccannaaaaaatgggtcccgcgggagaaaggcgct

SEQ ID NO: 586 - DNA, 3641 bp, Zea mays
  source (0)...(0): Zea mays BAC clone full insert sequence contig bacm.pk007.b16.fis20
cgaggccaaaagaagtgggcagccaacacctcatgtgtcttgtagacgccaaagtgccccatgagaccgcctccatgtgcttcctgtaacaacaaaagacgaaccgagctagctggaacacacagcttgttagcgcgaaacaggaacccatcctgtatgtgaaatttgccccatggtttcccattaaaacaatggccgaaagcatctttaaaatcagcatcgtcaacatattgatcttttacagtgtgcaaaccaaagattttaaaatctaactgtgacagcatggtatagcgacgagacaaagcatcagcaataacattgtccttcccgttcttgtgtttaataatgtaaggaaaagactcaatgaattctacccatttagcatgacgacggttcagatttgtttgggtacgaatatgttttaaagcctcatgatcagaatgaattatgaactcacgatgccaaagatagtgctgccatgtatgtaaagtgcgcactaacgcgtaaagctccttatcataagtagaatatttgagactagcaccgcttaatttttcactaaaataagcaactagttttccttcttgtaataaaacagcacctagcccaataccgctagcatcgcattcaagctcaaatactttattaaaatcaggcaattgcaataggggagcttgggttaacttatctttcaaagtgctgaacgcttcctcctgcgaatcactccaagcaaacggcacatctttctttgtaagctcatgtagaggcgctgcaatggagctaaaatcacgaacaaatctgcggtagaaaccgacaagtccaagaaagctccgaatttgtgtgaccgtcgtcggtgtaggccactcccgaatggcagcaatcttgctgctatccacctcaatgccctgtggagtaacaacataaccaagaaacgagacacgtcgtgtgcaaaagatgcatttttccatgttagcgaataactgggcggcacgcaatgcatcaaaaacagcacttaaatgttccaaatgctctttcttagatttgctgtaaataaggatatcatcgaaataaacaaccacaaacaatcctatgaagggcctcagaacttcattcatcactcgcataaaagtgctgggagcattagtcaatccaaacggcataaccaaccattcatataaaccaaatttcgttttgaaggttgttttccattcatcacccagtttcattctaatctggtggtaaccactacgcaaatcaatcttagtgaaaataatggcaccactaagctcatctagcatatcatcaaggcgtggtataggatagcgataacgaatagtgatgttattaatagcacgacagtctacacacatacgccatgacccatccttcttgggaacaagtaacacaggaacagagcaagggctaagagactcacgaatgtatcctttgtcaagcaacgcctgtacctggcgctgaatctccttcgtctcatccggatttgtacggtatggtgcgcggttcggaagctgtgcaccgggaatgaggtcgatctggtgctcaatgccacgaagcggtgggagacccggtggtaagtctttgggaaagacatcagcgtactcctgcaaaaggttagcaaccatagggggaatagccaaagatggtgcatcatcaagtgaaatgaggacactagagcatacaagtgcatagcatggcaaatgagcaccgtgtagatcatcaaaatcagcacgtgtagcaagtaaaacaggagccttcaacttaatttcagaaggaacagagggcgatggatcaagttgtttagcagttatagcagctcgggcaagatcatctttaacaatttgttcaggtgtcattggatgtataattattttctgacccttaaaaatgaaagaataatgatttgaacgaccatgatgcaagctatcagtatcatattgccaaggtcgaccaagtaacaaagagcatgcttccatgggaataacatcacaatcaacaaaatcagaataagcacccatggagaaaggaactcgcacggaacgcgtgatttttattttaccaccatcattaagccattgaatgtgatatgggtttggatgcttacgagtgggtaacgacaacttttcgaccagcatggtactcgccaaattgttgcaactgccgctgtcgataatgatgcgaattgaccgctcctgcacaacaccctttgtatggaacagggtgtgtcgctgattcttctcgggcaaagggacctgtgtactgagaacacgctgcacaacaagactttcatacctatcagcgtcgcccgggttgacatgtacctccgccttagctgcatggtcagtggcaagtagtgcatgttcaatttcttcagaatcactagcggaagagtactcaccatcgtcacgaatgagtaaagtgcgcttgtttgggcagtcccgaatcacatggccaaatcctctacagcgatgacactgaatatcccgtgtacgacctgtgggtggggcagtgctggctggtttggtcgtcttctcgcgtggagtagtggtggacgtggatggcgcagggggaactggtgctgaggtggatgtcgagcttcgtcctgcaaaagggttagaatattgcttcgagcggcgtccctgcacttcacgttcagctttgcaagcatattcaaataaagtagtcatatcataatattccttataatcaagtatatcttggatttcgcggtttaaaccaccacgaaaacgtgccatagcagcgtcgttgtcctccaatatcccacaacgaatcatacctttttgtaactcctggaaatagtcctcaacagattgagaaccttgctgaaaacgctgcattttattaagcaaatcacgagcataatacgaaggcacaaatcgatgtcgcatcgcagctttcaactgatcccaagtggttggaatggtagtgggatgttttattttaaactcacgccaccaaattaaagcaaaatcagtaaattcactaatagcagctttaccctgagaatgtgcagcaatatcatggcatgaaaatttttgttcaacctctaactcccaatcaagatatgcagcaggatcatatttgccattaaaaggtggaattttaaatttaatcttagaaaataagtcattagggggatgacgaaccacacggcgtgcacgaccacggcgatctccatcgtcccactcagtgtcaccgccgtagtcctgctccatctttgtggtcaacgcatcaaggcgtgccaggatggagtcgagtgtggtgcgagtcgccgtttgagcaaggtcaagctggttgaaacgctcggtcgtcgaagtgaccgttgaatcaagccgttcatgcatcgtcctaatgtcatcagcaagtccatcaacttgtccctttacttccagcaactgggcatccaccgtgtcatgtgctcctgccatagttagcgcaaacaccaaaacaccaaaaaacgacaaaaacaggggtgtactgctcacaaggcgctcacactagtgctgttatcaaattcttatccgttcttatcaaggtaaaagataccgtcgacctccacgcgttttatatgaacccattcgccctataggagtctatacgcggtc

SEQ ID NO: 587 - DNA, 6711 bp, Zea mays
  source (0)...(0): Zea mays BAC clone full insert sequence contig bacm.pk007.b16.fis21
tcgaccgcgtatcgactcctacagggcgaattgggtcaaatacacacccgtcgaggtcgacggtatttttcccttgatgtttttggaataccatgtaaacgaataatttctctaaagaacaattcagcaacaatgctagcatcatcagttttatgacaaggtataaagtgagccatttttgagaatctatcaacaaccacaaaaatactatccctccccttcttagttctaggcaagcccaaaacaaagtccatagagatatcaagccaaggagaagaagggacaggcaaaggcatatacaaaccatggttgttcaaccgtgacttagctttctgacaagtagtgcagcgtgcaacaaggcgctccacatcagcgcgcatccgaggccaaaagaaatgggcagccaacacctcatgcgttttgtagacgccaaaatgccccatgagaccgcctccatgcgcttcctgtaacaacaaaagacgaaccgagctagctggaacacacagcttgttagcgcgaaacaggaacccatcctgtatgtgaaatttgccccatggtatcccattaatacaatggccgaaagcatctttaaaatcagcatcgtcaacatattgatccttcacagtgtccaaaccaaagattttaaaatctaattgtgacagcatggtatagcgacgagacaaagcatcagcaataacattgtccttcccgttcttgtgtttaataatgtaaggaaaggactcaatgaattcgacccatttagcatgacgacggttcagatttgtttgggtacgaatatgttttaaagcctcatgatcagaatgaattatgaactcacgatgccaaagatagtgctgccaagtatgcaaagtgcgcactaaagcgtaaagttccttatcataagtagaatattttagactagcaccgcttaatttttcactaaaataagcaactggttttccttcttgtaacaaaacagcacctagcccaataccgctagcatcgcattcaagctcaaaaactttattaaaatcaggcaattgcaagaggggagcttgggttaacttatctttcaaagtgctgaacgctacctcctgcgaatcacttcaagcaaacggcacatctttctttgtaagctcatgtagaggcgctgcaatggagctaaaatcacgaataaatctgcggtagaaaccggcaagtccaagaaagctccgaatttgtgtgaccgtcgtcggtgtaggccactcccgaatggcagcaatcttgctgctatccacctcaatgccctgcggagtaaccacataaccaagaaacgagacacgttgcgtgcaaaatgtccacttttccatgttaccaaacaagcgagcagcacgcaaagcgtcaaaaacagcacgcaaatattctaaatgctcctctatagacttgctgtaaataaggatatcatcgaaataaacaacaacaaacaaacctatgaaggcccgtagaacttcgttcattaaacgcattaaggtgctgggagcattagtcaatccaaatggcataaccaaccattcatataaaccaaatttcgttttaaaagccgttttccattcatcaccgagtttcattctaatctgatggtaaccgctacgcaaatcaaccttagagaaaataacggcaccactaagctcatctagcatatcatcaaggcgtggaataggatatcgataacgaactgtgatgttattaatagcacgacaatctacgcacatacgccatgacccatctttctttggaacgagtaaaacaggaaccgagcaagggctaagagactcacaaatgtaacccttatcaagcagcgtctgcacctggcgctggatctccttcgtctcatctggatttgtacggtacggggcgcggttcggaagagaagcgccggggatgagatcgatctgatgctcaatgccacggaggggaggaagacccggtggtaagtccataggataaacatcagcatactcctgcaaaaggttaacaacagcagggggtatatccaaagatggtgcatcatcaagcggaacaagcattcgcgagcatacaagtgcataacagggcatatgagcttcatggagatcatcaaaatcagcacgtgtagcaagtaaaacaggagagtgcaacttgatttcagatttaataggtgcggctgatgtcgatttgacttgttgtgcagttttagcagccctagtaagatcatctttcaaaatttggtcagggtcattggatgtataattattttctggcctttaaacatgaaagaataatgatttgaacgaccatgatgtaaactatcagtatcatattgccaaggtcgacctaataacaaagagcatgcttccataggaataacatcgcaaacagcataatcagaataagaacccagcgaaaaggggacacgtaccgaacgtgttacctttattttaccaccatcattaagccattgaatgtgatacggatgtggatgtgtgcgagtgggcaaggataatttctctaccaacgctgtacttgccaaattgttgcagctgccactatcgatgatgatgcgaatcgaccgttcgtgcacgacgcccttggtatggaatagagtgtgtcgctgatttttttcggcctgggcaacctgtgtgctgagaacacgctgcacaacaagactctcatacccatcggcgtcgatgggatcaacgtggacttcctcattttctacatggttagtggcaatcatagcatgactagtttcctcagaatcactggctgaagagtactcaccattgtcacgtataagcaaggtacgcttgtttgggcagtcccgaatcatgtgcccaaaccctctgcaacgatggcacttaatatcccgtgtacgtcctgtggaagaagcggcgcctttggcagggggcgccactggcttggtcgtccctgtgcgcgaagtagtgctaggcgtagaaggtgcagggctggaaggagttgagctgtgtgttggaccccggcctgcaaaagagttagtatatgtctttgatcgtcgtccctgcacttcacgttcagctttgcaagcatattcaaacaatgtggttatatcaaaataatccttataatcaagtatatcctgaatttccctgttcaaaccaccacgaaaacgcgccatagcagcgtcatccgactcaaccaaaccacaacgaagcatacccttttgtaactcctggtaatattcctcaacagactgtgaaccttgttgaaaacgctgcattttgttaagcaaatcacgagcataattggaaggaacaaatctgtggcgcatggcagcttttaattgggtccaagtaatgacactgttaatgggaagtttttgtttatactcacgccaccaaattaaagcaaaatcagtaaattcactaatggcagccttcacttggctattagcagcaatatcatggcatgaaaatttctgttctacctctaattcccaatcaagatatgcagcaggatcatatttaccattaaaagatggaattttaaatttaatcttagaaaataagtcattagggggatgacgaaccacacgacgtgcacgaccacggcgatctccatcgtcctgctcagtgtcaccgccgtattcctgctccatctttgtggtcaatgcatcaaggcgtgccaggatggtgtcgagtgtggggcgagtcgccgtttgagcaaggtcaagttggttgaaacgctcggtcgtcgaagtgatcgttgaatcaagccgttcatgcatcgtcctaatgtcagcagcaagtccatcaacttgtccccttacttcctgcaactgggcatccaccatgtcgtgtgctcctgccatagttagcgcaaacaccaaaaggagaaaaaccaacgacaaaaacaggggtgtactgctcacaaggcgctcacactagtgctgttatcaagttcttatccgttcttaccaagccacagtggtgaactgcaatcaacaggtggaaccggtgaaagattggatgagcgattgcgtggagaaacagaaacctgctcgtcgtagaaatatgtggagttgtgggtaggctgcactcaagtcaaggattagcacgatcaaacaataatgcaaaattgaattatagtgcaaaacatgaaactatattgctggccacaggtgcaaaggatggatggaactagcagaatggcagtaccgtaaatattgtactagtgatgctaaaaaggcactagtagaaatcacaggtgattttgtttttctttttttgtatgattttttcgatatttttctcagcacaggaagcaacaagataggagctacacgaagtttcacctaaaacagatatcagatgtggtctatagaaaatcaggaagttctctgaaaagcgtgcgagaactttgacgaatttttttctttattttcctgaatttttttgacaattttgtcgaaccccaaacagaccgtaggtgagtttggccggcctcagaatggtgtcaactagctcctgtaaaaatttcagattttttggacacccgagcgaaaagttatgcccggtttacggaaggttcctcaagttatgttttaaaaaacgaccgggatgaaacaaacgtatcctttctccttcgttttctttttttttgtttctgtttttttttgtaaccgaaggagaaaaacaaggaagcgttcgttgactcggtttgtttttttttctgtttttttttcgtaaccgaaggagaaaatcaaggaaacggccgttgactcggtttgttttttctgtttttttttgacgtaaccgaaggagaaaaacaaggaaacaatgttgactcggtttgtggcgtgatcaaacgggagatggtggcggcgctagggtttgaatggtggaagaacacaatgcaaccagcaacaaatgacgcgaaagcacacaaattcaacaatgcagattattgaaagaaagtgcgaggctcaaaagggtgctgggataagatctaacctaaatttttatgcggttttgtggactgtaggaaaaaaaacgctcgataaactcaccgatcaacctggaaatctgataccaattgatgaagctgaggtgcccgatctttcggcgagtagagataattccgatttgtcggaagatgacccttgcgatccgactacgacgagcaagcccgaggcgccaatgcaatcgctgaaccaactccctgtggttaccgaccttgctgatgcgagatcggcctgatcacgaagatcgtttcctgtgcgcaatcgaagaacgaacaagaacaagatgcgagcaatctaatctattactcgagggtggagttctgaatacacgaagacagcgcagatttgcgcgtgttcgagagtagctgatgtagctgaggtgcccgatctttcggcgagtagagataattccgatttggcggaagttgacccttgcgatccgactacgacgagcaagcccgaggcgccaatgcaatcgctgaaccaactccctgtggttaccgaccttgctgatgcgagatcggcctgatcacgaagatcgtttcctgtgcgcaatcgaagaacgaacaagaaaaagatgcgagcaatctaatctattactcgagggtggagttctgaatacacgaagacagcgcagatttgcgcgtgttcgagagtagctaaagctaatgtaaaacaaaactcggaaaataaaggaggcgcagctcctgtataaatagagagggggcgcagccctaggggcggccaaccctaggtcgtccataatgggccgcaattgggctggtgatggtagctgaggtgcccgatctttcggcgagtagagataattccgatttggcggaagttgacccttgcgatccgactacgacgagcaagcccgaggcgccaatgcaatcgctgaaccaactccctgtggttaccgaccttgctgatgcgagatcggcctgatcacgaagatcgtttcctgtgcgcaatcgaagaacgaacaagaaaaagatgcgagcaatctaatctattactcgagggtggagttctgaatacacgaagacagcgcagatttgcgcgtgttcgagagtagctaaagctaatgtaaaacaaaactcggaaaataaaggaggcgcagctcctgtataaatagagagggggcgcagcccctaggggcggccaaccctaggtcgtccattatgggccgcaattgggctggtcgtctattcttccgggccttcgttctttaacaacatgatgtagttcaattctcttgcacgggcccgagtcactggcccaggtggaaggggtggcgcctggactggggaagatggtgcctgggctggagaagctgctgctggtgtagatgtgctcgtgttggtgttgatgtcctcatcacaccccaaacatgagttttgtacctaaagtagtggattgggcatgttcgttgtgaaaaacgaagaaatggttccggtggcaaaaactcgtgcttttatgcacccgacacccgttttcggaatgggtgacgtgcgacaacgaaattgcgagaaaccaccccaaacatgagttttggacctaaagtagtggattgggcatgttcgttgcgaaaaacgaagaaatggttctgctggcaaaaactcgtgctttgtatgcacccgacacccgttatcaagggagaagataccgtcgacctcgagcgttttgatttg

SEQ ID NO: 588 - DNA, 8199 bp, Zea mays
  source (0)...(0): Zea mays BAC clone full insert sequence contig bacm.pk007.b16.fis22
gggatataaaaacaatgtttttccccccgagaaccttttttttttttttcgccaagaaacccccccatttcatgttttgaggtccaaaatttttttggggtgtggttcggcacattttgtttgtcgcacctccccctttaagaaagcggggtgtggggtgcatacaaagcacgtatttccgccaccggacccatttttttttttttcgcaaaaaacccgcccaattcattatttgaggtccaaaactcttgtggggggtggtttcgagcaattttgttgtcgcacgtcacctccgaaaacgggtgtcgggtgcatacaaagcacggatttttgccaccggaaccatttctttgttttttgcaaggaacatgcccaatccactactttaggtccaaaactcatgtttggggtggtttcgcgcaatatcgttgtcgcacgtcacccattccgaaaacgggtgtcgtggtgcatacaaagcacgagtttttgccaccggaaccatttcttcgtttttcgcaacgaacatgcccaatccactactttaggttcaaaactcatgtttggggtggtttcgcgcaatttcgttgtcgcacgtcacccattccgaaaacgggtgtcggggtgcatacaaaccacgagtttttgcccccggaaccatttcttcgtttttcgcaacgaacatgcccaatccactactttaggtccaaaactcatgtttggggtggtttcgcataatttcgttgtcacacgtcacccattccgaaaacgggtgtcgggtgcatacaaagcacgagtttttgccaccggaaccatttcttcgtttttcgcaacgaacatgcccaatccactactttaggtacaaaactcatgtttggggtggtttcgcgcaatttcgttgtcgcacgtcacccattccgaaaacgggtgtcgtggtgcatacaaagcacaagtttttgccaccggaaccatttcttcgttttacgcaacgaacatgcccaatccactactttaggtccaaaactcatgtttggggtggtttcgcgcaatttcgtttccgcacgtcacccattccgaaaacgggtgtcgggtgcataaaagcacgagtttttgccacctgaaccatttcttcgtttttcgcaacgaacatgcccaatccactactttaggtccaaaactcatgtttggggtggtttcgcgcaatttcgttgtcgcacgtcacccattccgaaaacgggtgtcgtggtgcatacaaagcacgagtttttgccaccggaaccatttcttcgttttacgcaacgaacatgcccagtccactactttaggtacaaaactcatatttggggtggtttcgcgcaatttcgttgtcacatgtcacccattccgaaaacgggtgtcggggtgcataaaagcacgagtttttgccaccggaaccatttctttgtttttcgcaacgaacatgcccaatccactactttaggtccaaaactcatgtttggggtggtttcgcgcaattttgttgtcgcacgtcacccattccgaaaacgggtgtcggggtgcatacaaaccacgagtttttgccaccggaaccatttcttcatttttcgcaacgaacatgcccaatccactactttaggtacaaaactcatgtttggggtggtttcgctcaatttcgttgtcacacgtcacccattctgaaaacgggtgtcgggtgcataaaagcacgagttttagccaccggaaccatttcttcgtttttcgtaacgaacatgcccaatccactactttaggtccaaaactcatgtttggggtggtttcgcacaatttcgttgccgcacgtcacccattctgaaaacgggtgtcgggtgcatacaaagcacgagtttttgccaccagaaccatttcttcgtttttcgcaacgaacatgcccaatccactactttaggtccaaaactcatgtttggggtggtttcgcgcaatttcgttttcgcacgtcacccattccgaaaacgggtgtcgggtgcatacaaagcacgagtttttgccaccggaaccatttcttcgtttttcgcaacgaacatgcccaatccactactttaggtccaaaactcatgtttggggtggtttcccgcaatttcgtttccgcacgtcacccattctgaaaacgggtgtcgggggtgcatacaaagcaggggtttttgccaccggaaccattttttcgtttttcgcaacgaacatgcccaatccactactttaggtccaaaactcatgtttggggtggtttcgcgcaatttcgttgtcgcacgtcacccattccgaaaacgggtgtcgggtgcatacaaagcacgagtttttgccaccggaaccatttcttcgtttttcgcaacgaacatggccaatccactactttaggtccaaaactcatgtttggggtggtttcgcgcaatttcgttgtcgcacgtcacccattccgaaaacgggtgtcgtggtgcatacaaagcacgagtttttgccaccggaaccatttcttcatttttcgcaacgaacatgcccaatccactactttaggtacaaaactcatgtttggggtggtttcgcgcaatttcgttgtcacacgtcacccattctgaaaacgggtgtcgggtgcataaaagcacgagttttagccaccggaaccatttcttcgtttttcgtaactaacatgcccaatccactactttaggtccaaaactcatgtttggagtggtttcgcacaatttcgttgtcgcacgtcacccattcctaaaacgggtgtcgggtgcatacaaagcacgagtttttgccaccggaaccatttcttcgtttttcgcaatgaatatgcccaatctactactttaggtccaaaactcatgtttggggtggtttcgcgcaatttcgttgtcgcacgtcacccattccgaaaacgggtgtcggggtgcatacaaagcacgagtttttgccaccggaaccatttcttcgtttttcgcaacgaacatgcccaatccactactttaggtacaaaactcatgtttggggtggtttcgcgcaattttgttgccgcacgtcactcattccgaaaacgattgtcgggtgcataaaagcacgagtttttgccaccggaaccatttcttcgttttttcgtaacgaacatgcccaatccactactttaggtccaaaactcatgtttggggtggtttcgcacaatttcgttgtcacacgtcacccattccaaaaacgggtgtcgggtgcatacaaagcacgagtttttgccaccagaaccatttctttgtttttcgcaacgaacatgcccaatccactactttaggtccaaaactcatgtttggggtggtttctcgcaatttcgttgtcgcacgtcacccattccgaaaacgggtgtcgggtgcatacaaagcacgagtttttgccactggaaccatttcttcgtttttcgcaacgaacatgcccaatccactactttaggtccaaaactcatgtttggggtggtttcgtgcaatttcattgtcgcacgtcacccattccgaaaacgggtgtcgggtgcatacaaagcacgagtttttgccaccggaaccatttcttcgtttttcgcaacgaacatgcccaatccactactttaggtccaaaactcatgtttggggtggtttcgcgcaatttcgttgtcgcacgtcacccattccgaaaacaggtgtcgggtgcatacaaagcacgagtttttgccaccggaaccatttcttcgtttttcgcaacgaacatgcccaatccactactttaggtccaaaactcatgtttggggtggtttcgcgcaaatttgttgccgcacgtctcccattctgaaaacgggtgtcgggggtgcataaaagagaggattttttgccaccggaaccatttcttcgtttttcgcaacgaacatgcccaatccactactttaggtacaaaactcatgtttggggtggtttcgcgcaatttcgttgtcacacgtcacccattctgaaaacgggtgtaggggtgcatacaaagcacgagtttttgccaccggaaccatttcttcgtttttcgcaacgaacatgcccaatccactactttaggtccaaaacacatgtttggggtggtttctcgcaatttcgttgtcgcacgtcacccattccgaaaacgggtgtcgggtgcataaaagcacgagtttttgccaccggaaccatttcttcgtttttcgcaacgaacatgcccaatccactactttaggtccaaaactcatgtttggggtggtttcgcgcaatttcgtagccgcacttcacccattctgaaaatagttttcggggtgcatacaaagcaccagtttttgccaccggaaccatttcttcgtttttcgcaacgaacatgcccaatccactactttaggtacaaaactcatgtttggggtggtttcgcgcaatttcgttgccgcacgtcactcattccaaacacgaatgtcgggtgcataaaagcacgagtttttgccaccggaaccatttcttcgtttttcgtaacgaacatgcccaatccactactttaggtccaaaactcatgtttggggtggtttcgcgcaatttcgttgccgcacgtcacccattccgaaaatggttgtcggggtgcatacaaagcacgagtttttgccaccggaaccatttcttcgtttttcgcaacgaacatgcccaatccactactttaggtccaaaactcatgtttggggtgatttcttgcaatttcgttgtcgcacgtcacccattccgaaaacgtgtgtcgggtgcatacaaagcacgagtttttgccaccgaaaccatttctttgtttttcgcaaagaacatgcccaatccactactttaggtccaaaactcatgtttgggggggtttcgcgcaatttcgttgtcgcacgtcacccatttcgaaaacgggtgtcgtggtgcatacaaagcacgagtttttgccaccggaaccatttcttcgttttacgcaacgaacatgcccaatccactacattaggtacaaaactcatgtttggggtggtttcacgcaatttcgttgtcacacgtcacccattccgaaaacgggtgtcgggtgcataaaagcacgagtttttgccaccggaaccatttcttcgtttttcgtaacgaacatgcccaatccactactttaggtccaaatctcatgtttggggtggtttcgcacaatttcgttgccgcacgtcacccattctgaaaacgggtgtcgggtgcatacaaagcatgagtttttgccaccggaaccatttcttcggttttcgcaacgaacatgcccaatccactactttaggtccaaaactcatgtttggatggtttcgcacaatttcgttgtcgcacgtcacccattccgaaaacgggtgtcgggtgcatacaaagcacgagtttttgccaccggaaccatttcttcgtttttcgcaacgaacatgcccaatccactactttaggtccaaaactcatgtttggggtggtttcgcgcaatttcgttgtcgcacgtcacccattccgaaaacaggtgtcgggtgcatacaaagcacgagtttttgccaccggaaccatttcttcgtttttcgcaacgaacatgcccaatccactactttaggtccaatactcatgtctggggtggtttcgcgcaatttcgttgtcgcgcgtcacccattccgaaaacgggtgtcgtggtgcatacaaagcacgagtttttgccaccggaaccatttattcgttttacgcaacgaacatgcccaatccactactttaggtacaaaactcatgtttgcggtggtttcgcgcaatttcgttgtcacatgtcacccattccgaaaacgggtgtcgggtgcataaaagcacgagtttttgccaccggaaccatttcttcgtttttcgcaacgaacatgcccaatccactactttaggtacaaaactcatgtttggggtggtttcgcgcaatttcgttgtcacatgtcacccattccgaaaacgggtgtcgggtgcataaaagcacgagtttttgccaccggaaccatttcttcgtttttcgcaacgaacatgcccaatccactactttaggtacaaaactcatgtttggggtggtttcgcgcaatttcgttgtcacacgtcacccattctgaaaacgggtgtcgggtgcataaaagcacgagtttttgccaccggaaccatttcttcgtttttcgtaacaaacatgtccaatccactactttaggtccaaaactcatgtttggggtggtttcgcgcaatttcgtttccgcacgtcacccattccgaaaacgggtgtcgagtgcataaaagcacgaatttttgccaccggaaccatttcttcgtttttcgcaacgaacatgcccaatccactactttaggtccaaaactcatgtttggggtggtttcgcgcaatttcgttgtcgcacgtcacccattccgaaaacgggtgtcggggtgcatacaaagcacgagtttttgccaccggaaccatttcttcgtttttcgcaacggacatgcccaatccactactttaggtacaaaactcatgtttggggtggtttcgcacaattttgttgcctcacgtcacccattctgaaaacggttgtcggggtgcatacaaagcacgagtttttgccaccggaaccatttgttcgtttttcgtaacgaacatgcccaatccactactttaggtccaaaactcatgtttggggtggtttcgcacaatttcgttgtcgcacgtaacccattccgaaaacgggtgtcgggtgcatacaaagcacgagtttttgccaccggaacgatttcttcgtttttcgcaacgaacatgcccaatccactactttaggtccaaaactcatgtttggggtggtttcgcgcaatttcgttgtcgcacgtcacccattccgaaaacaggtgtcgggtgcatacaaagcacgagtttttgccaccggaaccatttcttcgtttatcgcaacgaacatgcccaatccactactttaggtcaaaaactcatgtttggggtggtttcgcgcaatttcgttgtcgcacgtcacccattccgaaacgggtgtcggggtgcatacaaagcacgagtttttgccaccggaaccatttcttcgttttacgcaacgaacatgcccaatccactactttaggtacaaaactcatgtttgggggggtttcgcgcaatttcgttgtcacatgtcacccattccgaaaacgggtgtcgggtgcataaaagcacgagtttttgccaccggaaccatttcttcgtttttcgcaacgaacatgcctaatccactactttaggtacaaaactcatgtttggggtggtttcgcgcaatttcgttgtcacacgtcacccattctgaaaacgtgtgtcgtgtgcataaaagcacgagtttttgccaccggaaccatttcttcgtttttcgtaacaaacatgcccaatccactactttaggtccaaaactcatgtttggggtggtttcgcgcaatttcgtttccgcacgtcacccattccgaaaacgggtgtcgagtgcataaaagcacgaatttttgccaccggaaccatttcttcgtttttcgcaacgaacatgcccaatccactactttaggtccaaaactcatgtttggggtggtttcgcgcaatttcgttgtcgcacgtcacccattccgaaaacgggtgtcggggtgcatacaaagcacgagtttttgccaccggaaccatttcttcgtttttcgcaacgaacatgcccaatccactactttaggtccaaaactcatgtttggggtggtttcgcgaaatttcgttgtcgcacgtcacccattccgaaaacgggtgtcgtggtgcatacaaagcacgagtttttgccaccggaacaatttcttcgtttttctcaacgaacatgcccaatccactactttaggtacaaaactcatgtttggggtggtttcgcgcaatttcgttgtcacacgtcaccattccgaaaacgggtgtcgagtgcataaaagcacgagtttttgccaccggaaccatttcttcgtttttcgcaacgaacatgcccaatccactactttaggtccaaaactcatgtttggggtggtttcacgcaatttcgttgtcgcacgtcaccca

SEQ ID NO: 589 - DNA, 8505 bp, Zea mays
  source (0)...(0): Zea mays BAC clone full insert sequence contig bacm.pk007.b16.fis23
gaggtatcttatcaataagaagggatgagttttgtacctaaagtagtggattgggcatgtccgttgcgaaacacgaagaaatggttccggtggcaaaaactcgtgctttgtatgcaccccgacacccgttttcggaatgggtgacgtgcgacaacgaaattgcgcgaaaccaccccaaacatgagttttggacctaaagtagtggattgggcatgttcgttgcgaaaaacgaagaaatggttccggtggcaaaaactcgtgcttttatgcactcgacacccgttttcggaatgggtgacgtgcggaaacgaaattgcgcgaaaccaccccaaacatgagttttggacctaaaatagtggaattggcatgttcgttgtgaaaaacgaagaaatggttccggtggcaaaaacttgtgctttgtatgcaccccgacaaccgttttcagaatcggtgacgtgcggcaacgaaattgcgcgaaaccaccccaaacatgagttttgtacctaaagtagtgaattgggcatgttcgttgcgaaaaacgaagaaatggttccggtggcaaaaactcgtaatttgtatgcaccccgacacccgttttcggaatggatgacgtgcgataacgaaattgcgcgaaaccaccccaaacaagagttttggacctaaagtagtggattgggcatgttcgttgcgaaaaacgaagaaatggttccggtggcaaaaactcgtgcttttatgcacccgacacctgttttcggaatgggtgagctgtgacaacgaaattgcgcgaaaccaccccaaacatgagttttgtacctaaagtagtggattgggcatgttcgttgcgtaaaacgaagaaatggttccggtggcaaaaactcgtgctttgtatgcaccacgacacccgttttcggaatgggtgacgtgcgacaacgaaattgcgcgaaaccaccccaaacatgagttttgtacctaaagtagtggattgggcatgttcgttgcgaaaaacgaagaaatggttccggtggcaaaaactcgtgctttgtatgcacccgacacccgttttcggaatgggtgacgtgcgacaacgaaattgcgcgaaaccaccccaaacatgagttttggacctaaagtagtggattgggcatgttcgttgcgaaaaacgaagaaatggttccggtggcaaaaactcgtgctttgtatgcacccgacacccgttttcagaatgggtgacgtgcgacaacgaaattatgcgaaaccaccccaaacatgagttttggacctaaagtagtggattgggcatgttcgttgcgaaaaacgaagaaatggttccggtggcaaaaactcgtggtttgtatgcaccccgacacccgttttcggaatgggtgacgtgcgacaacgaaattgcgcgaaaccaccccaaacatgagttttggacctaaagtagtggattgggcatgttcgttgcgaaaaacgaagaaatggttccggtggcaaaaactcgtgcttttatgcacccgacacccgttttcggaatgggtgacatgtgacaacgaaattgcgcgaaaccaccccaaatatgagttttgtacctaaagtagtggattgggcatgttcgttgcgtaaaacgaagaaatggttccggtggcaaaaactcgtggtttgtatgcaccacgacacccgttttcggaatgggtgacgtgcgacaacgaaattgcgcgaaaccaccccaaacatgagtttaggacctaaagtagtggattgggcatgttcgttgcgaaaaacgaagaaatggttcaggtggcaaaaactcgtgcttttatgcactcgacacccgttttcggaatgggtgacgtgcggaaacgaaattgcgcgaaaccaccccaaacatgagttttggacctaaagtagtggattgggcatgtgcgttgcgaaaaacgaagaaatggttccggtggcaaaaactcgtgcttttatgcacccgacacccgttttcggaatgggtgacatgtgacaacgaaattgcgcaaaaccaccccaaacatgagttttgtacctaaagtagtggattgggcatgttcgttgcgtaaaacgaagaaatggttccggtggcaaaaacttgtgctttgtatgcaccacgacacccgttttcggaatgggtgacgtgcgacaacgaaattgcgcgaaaccaccccaaacatgagttttggacctaaagtagtggattgggcatgttcgttgcgaaaaacgaagaaatggttccggtggcaaaaactcgtgcttttatgcacccgacacccgtttttggaatgggtgacatgtgacaacgaaattgcgcgaaaccaccccaaacatgagttttgtacctaaagtagtggattgggcatgttcgttgcgtaaaaaaaaaaaaatggttccggtggcaaaaacttgtgctttgtatgcaccacgacacccgttttcggaatgggtgacgtgcgacaacaaaattgtgcgaaaccaccccaaacatgagttttgtacctaaagtagtggattgggcatgttcgttgcgaaaaatgaagaaatggttccggtggcaaaaactcgtggtttgtatgcaccacgacacccgttttcggaatgggtgacgtgcgacaacaaaattgcgcgaaaccaccccaaacatgagtttaggacctaaagtagtggattgggcatgttcgttgcgaaaaacgaagaaatggttcaggtggcaaaaactcgtgcttttatgcactcgacacccgttttcggaatgggtgacgtgcggaaacgaaattgcgcgaaaccaccccaaacatgagttttggacctaaagtagtggattgggcatgtgcgttgcgaaaaacgaagaaatggttccggtggcaaaaactcgtgcttttatgcacccgacacccgttttcagaatgggtgacgtgtgacaacgaaattgcgcgaaaccaccccaaacatgagttttgtacctaaagtagtggattgggcatgttcgttgcgaaaaatgaagaaatggttccggtggcaaaaactcgtggtttgtatgcaccacgacacccgttttcggaatgggtgacgtgcgacaacgaaattgcgcgaaaccaccccaaacatgagttttggacctaaagtagtggattgggcatgttcgttgcgaaaaacgaagaaatggttccggtggcaaaaactcgtgcttttatgcacccgacacccgttttcggaatgggtgacgtgcgacaacgaaattgcgcgaaaccaccccaaacatgagttttggacctaaagtagtggattgggcatgttcgttgcgaaaaacgaagaaatggttccggtggcaaaaacttgtggtttgtatgcaccacgacacccattttcagaatgggtgacgtgcgacaacgaaattgcgcgaaaccaccccaaacatgagttttgtacctaaagtagtggattgggcatgttcgttgcgaaaaacgaagaaatggttctggtggcaaaaactcgtgcttttatgcacccgacacccgttttcggaatgggtgacatgtgacaacgaaattgcgcgaaaccaccccaaacatgagttttgtacctaaagtagtggattgggcatgttcgttgcgaaaaaacgaagaaatggttccggtggcaaaaactcgtgctttgtatgcaccacgacacccgttttcagaatgggtgacgtgtgacaacgaaattgcgcgaaaccaccccaaacatgagttttgtacctaaagtagtggattgggcatgttcgttgcgaaaaacgaagaaatggttccggtggcaaaaattcgtgcttttatgcactcgacacccgttttcggaatgggtgacgtgcggaaacgaaattgcgcgaaaccacccaaacatgagttttggacctaaagtagtggattgggcatattcgttacgaaaaacgaagaaatggttccggtggcaaaaactcgtgctttgtatgcaccccgacaaccgttttcagaatgggtgacgtgcggcaacaaaattgtgcgaaaccaccccaaacatgagttttgtacctaaagtagtggattgggcatgtccgttgcgaaaaacgaagaaatggttccggtggcaaaaactcgtgctttgtatgcaccccgacacccgttttgggaatgggtgacgtgcgacaacaaaattgcgcgaaaccaccccaaacatgagttttggacctaaaatagtgtattgggcatgttcgttgcgaaaaacgaagaaatagttccggtggcaaaaattcgtgcttttatgcactccacacccgttttcggaatgggtgacgtgcggaaacgaaatttcgcgaaaccaccccaaacatgagttttggacctaaagtagtggattgggcatgttcgttaggaaaaaaggaagaaatggttccggtggcaaaaactcgtgcttttatgcacccgacaatcgtttttggaatgagtgacgtgcggcaacaaaattgcgcgaaaccaccccaaacatgagttttgtacctaaagtagtggattgggcatgttcgttgcgaaaaaagaagaaatggttccggtggcaaaaaatcgtgctttgtatgcaccccgacacccgttttcggaatgggtgacgtgcgacaacgaaattgcgcgaaaccaccccaaacatgagttttggacctaaagtagtagattgggcatattcattgcgaaaaacgaagaaatggttccggtggcaaaaactcgtgctttgtatgcacccgccacccgttttaggaatgggtgacgtgcgacaacgaaattatgcgaaaccactccaaacatgagttttggacctaaagtagtggattgggcatgttagttacgaaaaacgaagaaatggttccggtggctaaaactcgtgcttttatgcacccgacacccgttttcagaatgggtgacgtgtgacaacgaaattgcgcgaaaccaccccaaacatgagttttgtacctaaagtagtggattgggcatgttcgttgcgaaaaatgaagaaatggttccggtggcaaaaactcgtgctttgtatgcaccacgacacccgttttcggaatgggtgacgtgcgacaacgatattgcgcgaaaccaccccaaacatgagttttggacctaaagtagtggattgggcatgttcgttgcgaaaaacgaagaaatggttccggtggcaaaaatccgtgctttgtatgcacccgacacccgttttcggaggtgacgtgcgacaacgaaattgcgcgaaaccaccccaaacatgagttttggacctaaagtagtggattgggcatgttcgttgcgaaaaacgaagaaatggttccggtggcaaaaatccgtgctttgtatgcacccgacacccgttttcggaatgggtgacgtgcgacaacgatattgcgcgaaaccaccccaaacatgagttttggacctaaagtagtggattgggcatgttcgttgcgaaaaacgaagaaatggttccggtggcaaaaactcgtgcttttatgcaccccgacaaccgttttcagaatcggtgacgtgcggcaacgaaattgcgcgaaaccaccccaaacatgagttttgtacctaaagtagtggattgggcatgttcgttgcgaaaaacgaagaaatggttccggtggcaaaaactcgtgctttgtatgcacccccgacaaccgttttcagaatgggtgacgtgcgacaacaaaattgcgcgaaaccaccacaaacatgagttttggacctaaagtagtggattgggcatgttcgttgcaaaaaacaaaaagtggttccggtggcaaaaactcgtgcttttatgcaccccgacaaccgttttcagaatcggtgacgtgcggcaacgaaattgcgcgaaaccaccccaaacatgagttttggacctaaagtagtggattgggcatgttcgttgcgaaaaacgaagaaatggttccggtggcaaaaactcgtgcttttatgcacccccgacaaccgttttcggaatgagtgacgtgcgacaacgaaattgcgcgaaaccaccacaaacatgagttttggacctaaagtagtggattgggcatgttcgttgcaaaaaacgaaaaaatggttccggtggcaaaaactcgtgcttttatgcacccgacacccgttttcggaatgggtgacgtgcggcaacgaaattgcgcgaaaccaccccaaacatgagttttggacctaaagtagtggattgggcatgttcgttgcgaaaaacgaagaaatggttccggtggcaaaaactcgtgctttgtatgcaccccgacaactgttttcagaatgggtgacgtgcggcaacgaaattgcgcgaaaccaccccaaacatgagttttggacctaaagtagtggattgggcatgttcgttgcgaaatacgaagaaatggttccggtggcaaaaactcgtgcttttatgcacccgacacccgttttcggaatgggtgacgtgcggcaacgaaattgcgcgaaaccaccccaaacatgagtgttgtacctacagtagtggattgggcatgttcgttgtgaaaaacgaagaaatggttccggtggcaaaaactcgtgctttgtatgcaccccgacaaccgttttcagaatgggtgacgtgcggcaacgaaattgcgcgaaaccaccccaaacatgagttttggacctaaagtagtggattgggcatgttcgttgcgaaaaacgaagaaatggttccggtggcaaaaactcgtgctttgtatgcaccccgacaaccgttttcagaatgagtgacgtgcggcaacgaaattgcgcgaaaccaccccaaacatgagttttggacctaaagtagtggattgggcatgttcgttacgaaaaacgaaggaatggttccggtggcaaaaactcgtgcttttatgcacccgacactcgttttcggaatgagtgacgtgcggcaacgaaattgtgcgaaaccaccccaaacatgagttttgtacctaaagtagtggattgggcatgttcgttgcgaaaaacgaagaaatggttccggtggcaaaaactcgtgctttgtatgcaccccgacaactgttttcagaatgggtgacgtgcggcaccgaaattgcgcgaaaccaccccaaacatgagttttggacctaaagtagtggattgggcatgttcgttgcgaaaaacgaagaaatggttccggtggcaaaaactcgtgcttttatgcacccgactcccgttttcggaatgggtgacgtgcggcaacgaaattgcgcgaaaccaccccaaacatgagtgttgtacctaaagtagtggattgggcatgttcgttgcgaaaaacgaagaaatggttcctgataaacccaacgggtagaagggtgcccgatctttcgatgagagatgatggtggtggaaaacttgttggagaacgactgatgaggacatcactatgagtacgactacaccagcagcacctccacatcaagcgccacttccttcattagctgggccaatcactcgggcccgtgcaagagatcttaacttcgtcatgctactaaagaatgatggcccagaagaatagacgaccagcccaactgcggcccatagtggacgacctagggttggccgcccctaggggctgcgccccctctatttatccaggagctgcgcctcctttattctcgagttttgttttacgttagccttagctactctcgaacacgcgcaaatctgcgctgtcttcgtgtattcagaactccaccctcgagtaatagattagattgctcgcatcttgttcttgttcgttcttcgattgcgcacaggaaacgatcttcgtgatcaggccgatctcgcatcagcaaggtcggtaaccacagggagttggttcagcgattgcattggcgcctcgggcttgctcgtcgtagtcggatcgcaagggtcatcttccgccaaatcggaattatctctactcgccgaaagatcgggcacctcagctacatcaattggtatcagatttccaggttgatcggtgagtttatcgagcgtttttttcctacagtccacaaaaccacataaaaattcaggttagatcttatcccagcacccttttgagcctcgcactttctttcaataatctgcattgttgaatttgtgtgctttcgcgtttccttgttgctggttgcattgtgttcttccaccattcaaatcctagcgccgccaccatctcccatttgatcacgccacaaaccgagtcaacatcgtctccttgtttttctccttcgattacgtcaaaaagaaaacagaaaaaacaaaccgagtcaacgaccgtttccttgattttctccttcggttacaaaaaaaaacagaaaaaaaaacaaaccgagtcaacgaccgcttgtttttctccttcggttacataaaaaaaccgaaacaaaaaaaaagaagacgaaagagaaaggatacggttgtttcatcccggtagttt

SEQ ID NO: 590 - DNA, 8158 bp, Zea mays
  source (0)...(0): Zea mays BAC clone full insert sequence contig bacm.pk007.b16.fis24
  misc_feature (1)...(8158): n = A,T,C or G
ggttgcacgtggcattattgtcagaaagctaagtcacggttgaacaaccatggtttgtatatgcctttgcctgttcctacttccccttggatggatatttcgatggattttgttttgggattgcctagaactaagaaggggagggatagcatttttgtggttgttgatcgattctccaaaatggctcatttcataccttgtcataagactgatgatgctagcaatgttgctgaattgttttttagagagattattcgtttgcacggtattcccaatacaatagtctcggatcgtgatgccaagtttctgagtcatttttggagatctctgtggaataaattaggaactaaattgctgtttagcaccacttgtcaccctcagactgatggtcaaactgaggtagttaatcgaactttgttgatgaagctgaggtgcccgatctttcggcgagtagagataattccgatttgtcggaagatgacccttgcgatccgactacgactagcaagcccgaggcgccaatgcaatcgctgaaccaactccctgtggttaccgaccttgctgatgcgagatcggcctgatcacgaagatcgtttcctgtgcacaatcgaagaacgaacaagaactagatgcgagcaatctaatctattactcgagggtggagttctgaatacacgaagacagcgcagatttgcgcgtgttcgagagtagctaaggctaacgtaaaacaaaactcaggaaataaaggaggcgcagctcctgaataaatagagagggggcgcagcccctaggggcggccaaccctaggtcgtccattatgggccgcaattgggctggtcgtctattcttccgggccttcgttctttaacaacatgatgtagttcaattctcttgcacgggcccgagtcactggcccaggtggaaagggtggcgcctgggctggagaaggtgctgctggtgtagatgtgctcgtgttggtgttgatgtccgcatcatcctccccttcttgaactgaagtcgtcctcgacggcaactcctcatcttctcccgcatacggtttcaaatctgcaacattaaaactagtggaaacaccaaactccgcaggtaggtcgagggtataagcattatcattaatcttggttagtatcttaaaaggaccagcagcacgaggcatcaatttagaacggcgcaatgtaggaaaacgatcctttctcaaatgcaaccaaaccatatcaccaggttcaaaagtaacatgttttcttcctttactaccagcaacctgattttttgtattagtagcagcaatgttctgtttcgtttgttcatgtatggtaatcatttgttcaacatgtgcagaagcatctacatgtggggcgttcgcagcattaagtgaaatcaaatcaataggtgccctaggaatgtaaccataaacaatctggaaagggcacatctttgtagaagaatgcgtggcatgattgtaagcaaattcaacatgagacaagcaatcctcccaacgtctcaaattcttgtctaaaacagccctaagcatggtagataaagttctatttactacctcagtttgtccatcagtctgagggtgacaagtagtgctaaacaacaatttagttcccaatttattccaaagagatctccaaaaatggcttagaaacttagcatcgcgatcagagactattgtttttggaataccatgtaaacgaataatttctctaaagaacaattcagcaacaatgctagcatcatcagttttatgacaaggtataaagtgagccattttagagaatctatcaacaaccacaaaaatactatccctccccttcttagttctaggcaagcccaaaacaaagtccatagagatatcaagccaaggagaagaagggacaggcaaaggcatatacaaaccatggttgttcaaccgtgacttagctttctgacaagtagtgcagcgtgcaacaaggcgctccacatcagcgcgcatccgaggccaaaagaaatgggcagccaacacctcatgtgtcttgtagacgccaaaatgccccatgagaccgcctccatgcgcttcctgtaacaacaaaagacgaaccgagctagctggaacacacagcttgttagagcgaaacaggaacccatcctgtatgtgaaatttgccccatggtttcccattaatacaatggccgaaagcatctttaaaatcagcatcgtcaacatattgatccttcacagtgtccaaaccaaagattttaaaatctaactgtgacagcatggtatagcgacgagacaaagcatcagcaataacattgtccttcccgttcttgtgtttaataatgtaaggaaaggactcaatgaattctacccatttagcatgacgacggttcagatttgtttgggtgcgaatatgttttaaagcctcatgatcagaatggattataaactcacgatgccaaagatagtgctgccatgtatgcaaagtgcgcactaaagcgtaaagctccttatcataagtagaatatttcagactagcaccgcttaatttttcactaaaataagcaactggttttccttcttgtaacaaaacagcacctagcccaataccgctagcatcgcattcaagctcaaacactttattaaaatcaggcaattgcaataggggagcttgggttaacttatctttcaaagtgctgaacgctacctcctgcgaatcactccaagcaaacgacacatctttctttgtaagctcatgtagaggcgctgcaatggagctaaaatcacgaacaaatctgcggtagaaaccggcaagtccaagaaaactccgaatttgtgtgaccgtcgtcggtgtaggccactcccgaatggcagcaatcttgctgctatccacctcaatgccctgcggagtaaccacataaccaagaaacgagacacgttgcgtgcaaaatgtgcacttttccatgttaccaaacaagcgagcagcacgcaaagcgtcaaaaacagcacgcaaatgttctaaatgctcctctatagacttgctgtaaataaggatatcatcgaaataaacaacaacaaacaaacctatgaaggcccgtagaacttcgttcattaaacgcataaaggtgctgggagcattagtcaatccaaatggcataaccaaccattcatataaaccaaattttgttttaaaagccgttttccattcatcaccgagtttcattctaatctgatggtaaccgctacgcaaatcaaccttagagaaaataacggcaccactaagctcatctagcatatcatcaaggcgtggaataggatatcgataacgaactgtgatgttattaatagcacgacaatctacgcacatacgccatgacccatctttctttgggacgagtaaaacaggaaccgagcaagggctaagagactcacgaatgtaacccttatcaagcagcgtctgcacctggcgctggatctccttcgtctcatctggatttgtacggtacggggcgcggttcggaagagaagcgccggggatgagatcgatctgatgctcaatgccacggaggggaggaagacccggtggtaagtccgtaggataaacatcagcatactcctgcaaaaggttaacaacagcagggggtatatccaaagacggtgcatcatcaagcggaacaagcattcgcgagcatacaagtgcataacagggcatatgagcttcatggagatcatcaaaatcagcacgtgtagcaagtaaaacaggagagtgcaacttgatttcagatttaataagtgcggctgatgtcgatttgacttgttgtgcagttttagcagccctagtaagatcatctttcaaaatttggtcaggggtcattggatgtataattattttctggcctttaaacatgaaagaataatgatttgaacgaccatgatgtaaactatcagtatcatattgccaaggtcgacctaataacaaagagcatgcttccataggaataacatcgcaatcagcataatcagaataagaacccagcgaaaaggggacacgtaccgaacgtgttacctttattttaccaccatcattaagccattgaatgtgatacggatgtggatgtgtgcgagtgggcaaggataatttctctaccaacgctgtacttgccaaattgttgcagctgccactatcgatgatgatgcgaatcgaccgttcgtgcacgacgcccttggtatggaatagagtgtgtcgctgatttttttcggcctgggcaacctgtgtgctgagaacacgctgcacaacaagactctcatacctatcggcgtcgataggatcaacgtggacttcctcattttctgcatggttagtggcaatcatagcatgactagtttcctcagaatcactggctgaagagtactcaccattgtcacgtataagcaaggtacgcttgtttgggcagtcccgaatcatatgcccaaaccctctacaacgatggcactgaatatcccgtgtacgtcctgtggaagaagcggcgcctttggcagggggcgccactggcttggtcgtccctgtgcgcgatgtagtgctaggcgtagaaggtgcagggctggaaggagttgagctgtgtgttggaccccggcctgcaagagagttagtatatgtctttgatcgtcgtccctgcacttcacgttcagctttgcaagcatattcaaacaatgtggttatatcaaaataatccttataatcaagtatatcctgaatttccctgttcaaaccaccacgaaaacgcgccatagcagcgtcatccgactcaactaaaccacaacgaagcatacccttttgtaactcctggtaataatcctcaacagactgtgaaccttattgaaaacgctgcattttgttaagcaaatcacgagcataataggaaggaacaaatctgtggcgcatggcagtttttaattgggtccaagtaatgacactgttaatgggaagtttttgtttatactcacgccaccaaattaaagcaaaatcagtaaattcactaatggcagccttcacttggctattagcaggaatatcatggcatgaaaatttctgttctacctctaattcccaatcaagatatgcagcaggatcatatttaccattaaaagatggaattttaaatttaatcttagaaaataagtcattagggggatgacgaaccacacgacgtgcacgaccacggcgatctccatcgtcctgctcagtgtcaccgccgtattcctgctccatctttgtggtcagtgcatcaaggcgtgccaggatggtgtcgagtgtggtgcgagtcgccgtttgagcaaggtcaagttggttgaaacgctcgatcgtcgaagtgatcgttgaatcaagccgttcatgcaccgtcctaatgtcagcagcaagtccatcaacttgtccccttacttcctggcattcctgcaactgggcatccaccatgtcgtgtgctcctgccatagttagcgcaaacaccaaaaggagaaaaaccaacgacaaaaacaggggtgtactgctcacaaggcgctcacactagtgctgttataaagtttttatccgttcttaccaagccacagtggtgaactgcaaccaacaggtggaaccggtgaaagattggatgagcgattgcgtggagaaacagaaacctgctcgtcgtagaaatatgtggagttgtgggtaggctgcactcaagtcaaggattagcacgatcaaacaataatgcaaagttgaattatagtgcaaaacacgaaactatattgctggccacaggtgcaaaggatggatggaactagcagaatggcagtaccgtaaatattgtactagtgatgccaaaaaggcactagtagaaatcacaggtgattttgtttttctttttttttatgatttttttgatatttttctcagcacaagaagcaacaagataggagctacacgaagtttcacctaaaacagatatcagatgtggtctacagaaaatcaggaagttctctgaaaagcgtgcgagaactttgacggatttttttctttattttcctgaatttttttgacaattttgtcgaaccccaaacagaccgtaggtttgcttggccgggctcagaatggtgtcaactagctcctgtaaaaatttcagattttttggacacccgagcgaaaagttatgcccggtttacggaaggtacctcaagttatgttctaaaaacgaccgggatgaaacaaccgtatcctttctccttcgttatctttttttttctgttttttttgacgtaaccgaaggagaaaaacaaggaaggttgactcggtttgttttttttctgttttttttcgtaaccgaaggagaaaatcaaggaaacggtcgttgactcggtttgttttttctgttttttttttgacgtaaccgaaggagaaaaataaggaaacgatgttgactcggtttgtggcgtgatcaaacgggagatggtggcggcgctagggtttgaatggtggaagaacacaatgcaaccagcaacaaatgacgcgaaagcacacaaattcaacaatgcagattattgaaagaaagtgcgaggctcaaaagggtgctgggataagatctaacctgaatttttatgtggttttgtggactgtaggaaaaaaacgctcgataaactcaccgatcaacctggctctgataccaattgatgaagctgaggtgcccgatctttcggcgagtagagataattccgatttgtcggaagatgacccttgcgatccgactacgacgagcaagcccgaggcgccaatgcaatcgctgaaccaactccctgtggttaccgaccttgctgatgcgagatcggcctgatcacgaagatcgtttcctgtgcgcaatcgaagaacgaacaagaactagatgcgagcaatctaatctattactcgagggtggagttctgaatacacgaagacagcgcagatttgcgcgtgttcgagagtagctaaggctaacgtaaaacaaaactcaggaaataaaggaggcgcagctcctgaataaatagagagggggcgcagcccctaggggcggccaaccctaggtcgtccattatgggccgcaattgggctggtcgtctattcttccgggccttcgttctttaacaacatgatgtagttcaattctcttgcacgggcccgagtcactggcccaggtggaaagggtggcgcctgggctggagaaggtgctgctggtgtagatgtgctcgtgttggtgttgatgtccgcatcatttgtctaccatgcttagggctgttttagacaaaaatttgaaacgttgggaggattgcttacctcatgttgagtttgcttataatcatgcaacacattcttctacaaagatgtgcccttttcaaattgtttatggttacattcctagggcgcctattgctttgttttcgcttgatgctacggatgccccacacatagatgctcttgcacatgttgaacaaatgattaatctccatgaacaaactcaacaaaacattgctgctgctaatgctaaatatcagattactggtagtaaaggccggaaactagttacttttgaacctggtgatatggtttggttgcatttgagaaaggatcgttttcctattttgcgccgttctaaattgatgcctcgtgctgctggtccttttaaggtactaaccaagattaatgataatgcttatatccttgacctgcctgcggagtttggtgtttccactagttttaatgttgcagatttgaaaccgtatgcgggagaagatgaggagttgccgtcgaggacgacttcagttcaagaaggggaggatgatgaggacatcaacaccaacacgagcacatctacgccagcagcaccttctccagcccaggcaccatcttccccagtccaggcgccaccccttccacctgggccagtgactcgggcccgtgcaagagaattgaactacatcatgttgttaaagaacgaaggcccggaagaatagacgaccagcccaattgcggcccataatggacgacctanggttgcgccccccctanggggctgcgcccccctctctatttatacaggagctgcgcctcttttattttgccagttttgttttacattagctttagctactc

SEQ ID NO: 591 - DNA, 676 bp, Zea mays
  source (0)...(0): Zea mays BAC clone full insert sequence contig bacm.pk128.j21.fis1
  misc_feature (1)...(676): n = A,T,C or G
ngacnnnnnnnnnnnnnnnnnnnnnnnnnnnnnnnnnnnnnnnnnnnnnnnnnnnnnnnnnnnnnnnnnnnnnnnnncaacgaacatgcccaatccactactttaggtccaaaactcttcgtttttcgcaacgaacatgcccaatccactactttaggtccaaaactcatgtttggggtggtttcgcgcaatttcgttgtctcacgtcaccctttccgaaaacgggtgtcgggtgcatacaaagcacgagtttttgccaccggaaccatttcttcgtttttcgcaacgaacatgcccaatccactactttaggtccaaaactcatgtttgggggtggtttcgcgcaatttcgttgtcgcacgtcacacattccgaaaacgggtgtcggggtgcatacaaagcacgagtttttgccagcggaaccatttcttcttttttcgtaacgaacatgcccaatccactactttaggtccaaaactcatgtttgaggtggtttcgcgcaatttcgttgtcgcacgtcaaccattctgaaaactggtatcggggtgcataaaagcacgagtttttgccaccggaaccatttcttcgtttttcgcaacgaacatgcccaatccactactttaggtccaaaactcatgtttggggtggtttcgcgcaatttcgttgtcccacgtcc

SEQ ID NO: 592 - DNA, 686 bp, Zea mays
  source (0)...(0): Zea mays BAC clone full insert sequence contig bacm.pk128.j21.fis2
  misc_feature (1)...(686): n = A,T,C or G
tcgnnnnnnnnnnnnnnnnnnnnnnnnnnnnnnnnnnnnnnnnnnnnnnnnnnnnnnnnnnnnnnnnnnnnnnnnnnnnnnnnnnnnnnnnnnnnnnnnnnnnnccggtggcaaaaactcgtgctttgtatgcaccctgacaacccgttttcggaatgtgtgacgtgcgataacgaaattgcgcgaaacaaccccaaacatgagttttggacctaaagtagtggattgggcatgttcgttgcgaaaaacgaagaaatggttccggtggcaaaaactcgtgctttgtatgcaccccgacaaccggttttcggaatgggtgaagtgcgacaacgaaattgcgcgaaaccaccccaaacatgagttttggacctaaagtagtggattgggcatgttcgttgcgaagaacgaagaaatggttccggtggcaaaaactcgtgctttgtatgcacccgacacccgttttcggtatgggtgacgtgcgacaacgaaattgcacgaaaccaccacaaacatgagttttggacctaaagtagtggattgggcatgttcgttgcgaaaaacgaagaaatggttccggtggcaaaaactcgtgctttgtatgcacccccgacaaacccgttttcggaatgtgtgacgtgcgacaacgaaattgcgcgaaaccaccccaaacatgagttttggagcta

SEQ ID NO: 593 - DNA, 1193 bp, Zea mays
  source (0)...(0): Zea mays BAC clone full insert sequence contig bacm.pk128.j21.fis3
gatcaaaccgggaggcgacgatcgataccttgattttgacggatttttttctttattttcctgaatttttttgacaattttgtcgaacccaaacagaccgaaggtgagtttggccggcctcagaatggtgtcaactagctcctgtaaaaatttcagatttttcggacacccgagcgaaaagttatgcccggtttaaggaaggtacctcaagttatgttttcaaacgaccgggatgaaacaaccgtatcctttctccttcgttgtttttttttgtttctgttttttttttgacgtaaccgaaggagaaaaacaaggaaacgatgttgcctcggtttttttttttctgttttttttcgtaaccgaaggagaaaaacaaggaaacggccgttgactccgtttgttttttctgtttttttttacgtaaccgaaggagaaaaacaaggaaacaatgttgactcggtttgtggcgtgatcaaaggggagatggtggcggcgctaggatatgaatggtggaagaacacaatgcaaccagcaacaaggaaacgcgaaagcacacaaattcaacaatgcagattattgaaagaaagtgcgaggctcaaaagggtgctcggataaggtctaacctgaatttttatgtggttttgtggactgtaggaaaaaaaaactcgataaactcaccgatcaacctggaaatctgataccaattgatgaagctgaggtgcccgatctttcggcgagtagagataattccgatttgcggaagatgacccttgcgatccgactacgacgagcaagcccgaggcgccaatgcaatcgctgaaccaactccctgtggttaccgaccttgctgatgcgagatcggcctgatcacgaagatcgtttcctgtgcgcaatcgaagaacgaacaagaacaagatgcgagcaatctaatctattactcgaaggtggagttctgaatacacgaagacagcgcagatttgcgcgtgttcgagagtagctaaggctaacgtaaaacaaaactcggaaaataaaggaggcgcagctcctgtataaatagagagggggcgcagccctaggggcggccaaccctaggtcgtccataatgggccgcaattgggctggtcgtctattcttctgggccttcgttctttaacaacatgatgtagttcaattctcttgcacgggcccgagtc

SEQ ID NO: 594 - DNA, 1040 bp, Zea mays
  source (0)...(0): Zea mays BAC clone full insert sequence contig bacm.pk128.j21.fis4
ctgcgtttttcgcaacgaacatgcccaatccactactttaggtccaaaactcatgtttgaggtggtttcgcgcaatttcgttgtcgcacgtcaccctttccgaaaacgggtgtcgggtgcatacaaagcacgagtttttgccaccggaaccatttcttcgtttttcgcaacgaacatgcccaatccactactttaggtccaaaactcatgtttggggtggtttcgcgcaatttcgttgtcgcacgtcacacattccgaaaacgggttgtcggggtgcatacaaagcacgattttttgccaccggaaccatttcttcttttttcgcaacgaacatgcccaaaccactactttaggtccaaaacttatgtttggggttgtttcgcgcaatttcgttatcgcacgtcacacattccaaaaacggttgtcggggtgcatacaaagcacgattttttgccaccggaaccatttcttcttttttcgcaacgaacatgcccaatccactactttaggtccaaaactcatgtttggggtggtttcgcgcaatttcgttgtcgcacgtcaccctttccgaaaacgggtgtcgggtgcatacaaagcacgagtttttgccaccggaaccatttcttcgtttttcgcaacgaacatgcccaatccactactttaggtccaaaactcatgtttggggtggtttcgcgcaatttcgttgtcgcacgtcaccctttccgaaaaagggtgtcgggtgcatacaaagcaccagtttttgccaccggaaacattttttccttttttgcaacaaacatgcccaaaccactactttaagtccaaaaatcaagtttgggggggtttctcgcaatttttttgtcacacgtcacacatttcaaaaaaaggttgtcggggggcataaaaaacaagaattttttccaccagaaacattttttcttttttcacaaaaaaaaagcccaaacccctactttagggccaaaacatatttttggggttgtttcgcaaaattttcttatccaccgcaacattccaaaaag

SEQ ID NO: 595 - DNA, 2686 bp, Zea mays
  source (0)...(0): Zea mays BAC clone full insert sequence contig bacm.pk128.j21.fis5
ccattctgaaaacgggtatcgaggtgcataaaagcacgagtttttgccaccggaaccatttcttcgtttttcgcaacgaacatgcccaatccactactttaggtccaaaactcatgtttggggttgtttcgcgtaatttcgttgtcgcacgtcacccattccgaaaacgggtgtcggggtgcatacaaagcacgagtttttgccatcggaaccatttcttcgtttttcgcaacgaacatgcccaatccactactttaggtccaaaactcatgtttggggtggtttcgcgcaatttcgttgtcgcacgtcacccattccgaaaacgggtgtcgggtgcacaaagcacgagtttttgccaccggaaccatttcttcgtttttcgcaacgaacatgcccaatccactactttagctccaaaactcatgtttggggtggtttcgcgcaatttcgtatgtcgcacgtcacacattccgaaaacgggtttgtcgggggtgcatacaaagcacgagtttttgccaccggaaccatttcttcgtttttcgcaacgaacatgcccaatccactactttaggtccaaaactcatgtttggggtggtttcgtgcaatttcgttgtcgcacgtcacacattccgaaaacgggttgtcggggtgcatacaaagcacgagtttttgccaccggaaccattgcttcgtttttcgcatcgaacatgcccaaacaactactttaggtccaaaacttatgtttggggttgtttcgcgcaatttcgttatcgcacgtcacacattccgaaaacggttgtcggggtgcatacaaagcacgagtttttgccaccggaaccatttcttcgtttttcgcaacgaacatgcccaatccactactttaggtccaaaactcatgtttggggtggtttcgcgcaatttcgttgtcgcacgtcacacattccgaaaacgggtgtcgggtgcatacaaagcacgagtttttgccagcggaaccatttcgtcgtttttcgcaacgaacatgcccaatccactactttaggtccaaaactcatgtttgaggtggtttcgcgcaatttcgttgtcgcacgtcaaccattcagaaaacaggtatcgaggtgcataaaagcacgagtttttgccaccggaaccatttcttcttttttcgcaacgaacatgcccaatccactactttaggtccaaaactcatgtttggggtggtttcgcgcaatttcgttgtcgcacgtcaccctttccgaaaacgggtgtcgggtgcatacaaagcacgagtttttgccaccggaaccatttcttcgtttttcgcaacgaacatgcccaatccactactttaggtccaaaactcatgtttggggtggtttcgcgcaatttcgttgtcgcacgtcaccctttccgaaaatgggtgtcgggtgcatacaaagcacgagtttttgccaccggaaccatttcttcgtttttcgcaacgaacatgcccaatccagtactttaggtccaaaactcatgtttggggtggtttcgcgcaatttcgttgtcacacgtcacacattccgaaaacgggttgtcggggtgcatacaaagcacgagtttttgccaccggaaccatttcttcgtttttcgcaacgaacatgcccaaaccactactttaggtccaaaacttatgtttggggttgtttcgcgcaatttcgttatcgcacgtcacacattccgaaaacggttgtcggggtgcatacaaagcacgagtttttgccaccagaaccatttcttcgtttttcgcaacgaacatgcccaatccactactttaggtccaaaactcatgtttggggtggtttcacgcaatttcgttgtcgcacgtcacacattccgaaaacgggtgtcgggtgcatacaaagcacgagtttttgcaagcggaaccatttcgtcgtttttcgcaacgaacatgcccaatccactagtttaggtccaaaactaatgttgaggtggtttcgcgcaatttcgttgtcgcacgtcacccattctgaaaacgggtatcgaggtgcataaaagcacgagtttttgccaccggaaccatttcttcgtttttcgcaacgaacatgcccaatccactaccttaggtccaaaactcatgtttggggtggtttcgcgcaatttcgttatcgcacgtcaccctttccaaaaacgggtgtcgggtgcatacaaagcacgagtttttgccaccggaaccatttcttcgtttttcgcaacgaacatgcccaatccactactttaggtccaaaactcatgtttggggtggtttcgcgcaatttcgttgtcgcacgtcacacattccgaaaacgggttatcggggtgcatacaaagcacgagtttttgccaccggaaccatttcttcgtttttcgcaacgaacatgcccaatccactactttaggtccaaaactcatgtttggggttgtttcgcgtaatttcgttatcgcacgtcacccattccgaaaacgggtgtcggggtgcatacaaagcacgagtttttgccagcggaaccatttcttcgttttcgtaacgaacatgcccaatccactactttaggtccaaaactcatgtttgaggtggtttcgcgcaatttcgttgtcgcacgtcacccattctgaaaacaagtatcgaggtgcataaaagcacgat

SEQ ID NO: 596 - DNA, 2968 bp, Zea mays
  source (0)...(0): Zea mays BAC clone full insert sequence contig bacm.pk128.j21.fis6
tgacgtgcgacaacgaaattgcgtgaaaccaccccaaacatgagttttggacctaaactagtggattgggcatgttcgttgcgaaaaacgacgaaatggttccgctggcaaaaactcgtgctttgtatgcacccgacacccgttttcggaatgtgtgacgtgcgacaacgaaattgcgcgaaaccaccccaaacatgagttttggacctaaagtagtggattgggcatgttcgttgcgaaaaacgaagaaatggttccggtggcaaaaactcgtgctttgtatgcacccgacacccgtttttggaaagggtgacgtgcgataacgaaattgcgcgaaaccaccccaaacatgagttttggacctaaagtagtggattgggcatgttcgttgcgaaaaacgaagaaatggttccagtggcaaaaactcgtgcttttatgcacctcgatacccgttttcagaatgggtgacgtgcgacaacgaaattgcgcgaaaccacctcaacattagttttggacctaaagtagtggattgggcatgttcgttgcgaaaaacgacgaaatggttccgctggcaaaaactcgtgctttgtatgcacccgacacccgttttcggaatgtgtgacgtgcgacaacgaaattgcgtgaaaccaccccaaacatgagttttggacctaaagtagtggattgggcatgttcgttgcgaaaaacgaagaaatggttccggtggcaaaaactcgtgctttgtacgcaccccgacaaccgttttcggaatgtgtgacgtgcgataacgaaattgcgcgaaacaaccccaaacataagttttggacctaaagtagtggattgggcatgttcgttgcgaaaaacgaagaaatggttccggtggcaaaaactcgtgcttttatgcacctcgatacccgttttcagaatgggtgacgtgcgacaacgaaattgcgcgaaaccacctcaacattagttttggacctaaactagtggattgggcatgttcgttgtgaaaaacgacgaaatggttccgctggcaaaaactcgtgctttgtatgcacccgacacccgttttcggaatgtgtgacgtgcgacaacgaaattgcgcgaaaccaccccaaacatgagttttggacctaaaccagtggattgggcatgttcgttgcgaaaaacgacgaaatggttccgctggcaaaaactcgtgctttgtatgcacccgacacccgttttcggaatgtgtgacgtgcgacaacgaaattgcgcgaaaccaccccaaacatgagttttggacctcaagtagtggattgggcatgttcgttgcgaaaaacgaagaaatggttccggtggcaaaaactcgtgcttttatgcacctcgatacgtattttcagaatgggtgacatgcgataacgaaattgcgcgaaacaaccccaaacataagttttggacctaaagtagtggtttgggcatgttcgatgcgaaaaacgaagcaatggttccggtggcaaaaactcgtgctttgtatgcaccccgacaacccgttttcggaatgtgtgacgtgcgacaacgaaattgcacgaaaccaccccaaacatgagttttggacctaaagtagtggattgggcatgttcgttgcgaaaaacgaagaaatggttccggtggcaaaaactcgtgcttttatgcacctcgatacccgttttcagaatgggtgacgtgcgacaacgaaattgcgcgaaaccacctcaacattagttttggacctaaactagtggattgggcatgttcgttgcgaaaaacgacgaaatggttccgctgacaaaaactcgtgctttgtatgcacccgacacccgttttcggaatgtgtgacgtgcgacaacgaaattgcgtgaaaccaccccaaacatgagttttggacctaaagtagtggattgggcatgttcgttgcgaaaaacgaagaaatggttccggtggcaaaaactcgtgctttgtatgcaccccgacaacccgttttcggaatgtgtgacatgcgataacgaaattgcgcgaaacaaccccaaacatgagttttggacctaaagtagtggattgggcatgttcgttgcgaaaaacgaaaaaaatggttccggtggcaaaaactcgtgctttgtatgcaccccgacaaccgttttcggaatgtgtgacgtgcgataacgaaattgcgcgaaacaaccccaaacataagttttggacctaaagtagtggtttgggcatgttcgatgcgaaaaacgaagaaatggttccggtggcaaaaactcgtgctttgtatgcaccccgacaacccgttttcggaatgtgtgatgtgcgacaacaaaattgcacgaaaccaccccaaacatgagttttggacctaaagtagtggattgggcatgttcgttgcgaaaaacgaagaaatggttccggtggcaaaaactcgtgcttttatgcacctcgatacccgttttcagaatgggtgacgtgcgacaacgaaattgcgcgaaaccacctcaacattagttttggacctaaactagtggattgggcatgttcgttgcgaaaaacgacgaaatggttccgttggcaaaaactcgtgctttgtatgcacccgacacccgttttcggaatgtgtgacgtgcgacaacgaaattgcgcgaaaccaccccaaacatgagttttggacctaaaccagtggatggggcatgttcgttgcgaaaaacgaagaaatggttccgctggcaaaaactcgtgctttgtatgcacccgacacccgttttcggaatgtgtgacgtgcgacaacgaaattgcgcgaaaccaccccaaacatgagttttggacctaaagtagtggattgggcatgttcgttgcgaaaaacgaagaaatggttccggtggcaaaaactcgtgctttgtacgcaccccgaatcaaggttacgatacctcgcctcgcctaaggaaac

SEQ ID NO: 597 - DNA, 3645 bp, Zea mays
  source (0)...(0): Zea mays BAC clone full insert sequence contig bacm.pk128.j21.fis7
tacgaaaacgggttgtcggggtgcatacaaagcacgagtttttgccaccggaaccatttcttcgtttttcgcaacgaacatgcccaatccactactttaggtccaaaactcatgtttggggttgtttcgcgtaatttcgttatcgcacgtcaaccattctgaaaacaggtatcgaggtgcataaaagcacgagtttttgccactggaaccatttcttcgtttttcgcaacgaacatgcccaatccactactttaggtccaaaactcatgtttggggtggtttcgcgcaatttcgttgtcgcacgtcaccctttccgaaaacgggtgtcgggtgcatacaaagcacgagtttttgccaccggaaccatttcttcgtttttcgcaacgaacatgcccaatccactactttaggtccaaaactcatgtttggggtggtttcgcgcaatttcgttgtcgcacgtcaccctttccgaaaacgggtgtcgggtgcatacaaagcacgagtttttgccaccggaaccatttctttgtttttcgcaatgaacatgcccaatccagtactttaggtccaaaactcatgtttggggtggtttcgcgcaatttcgttgtcgcacgtcacacattccgaaaacgggttgtcggggtgcatacaaagcacgagtttttgccaccggaaccatttcttcgtttttcgcaacgaacatgcccaaaccactactttaggtccaaaacttatgtttggggttgtttcgcgcaatttcgttatcgcacgtcacacattccgaaaacggttgtcggggtgcatacaaagcacgagtttttgccaccggaaccatttcttcgtttttcgcaacgaacatgcccaatccactactttaggtccaaaactcatgtttggggtggtttcgcgcaatttcgttgtcgcacgtcacacattccgaaaacgggtgtcgggtgcatacaaagcacgagtttttgccagcggaaccatttcgtcgtttttcgcaacgaacatgcccaatccactggtttaggtccaaaactcatgtttggggtggtttcgcgcaatttcgttgtcgcacgtcacacattccgaaaacgggtgtcgggtgcatacaaagcacgagtttttgccagcggaaccatttcgtcgtttttcgcaacgaacatgcccaatccactagtttaggtccaaaactaatgttgaggtggtttcgcgaaatttcgttgtcgcacgtcaccctttccgaaaacgggtgtcgggtgcatacaaagcacgagtttttgccaccggaaccatttcttcgtttttcgcaacgaacatgcccaatccactactttaggtccaaaactcatgtttggggtggtttcgtgcaatttcgttgtcgcacgtcacacattccgaaaacgggttgtcggggtgcatacaaagcacgagtttttgccaccggaaccatttcttcgtttttcgcatcgaacatgcccaaaccactactttaggtccaaaacttatgtttggggttgtttcgcgcaatttcgttatcgcacgtcacacattccgaaaacggttgtcggggtgcatacaaagcacgagtttttgccaccggaaccatttcttcgtttttcgcaacgaacatgctcaaaccactactttaggtccaaaactcatgtttggggttgtttcgcgcaatttcgttatcgcacgtcacacattccgaaaacgggttgtcggggtgcatacaaagcacgagtttttgccaccggaaccatttcgtcgtttttcgcaacgaacatgcccaatccactactttaggtccaaaactcatgtttggggtggtttcgcgtaatttcgttgtcgcacgtcaccctttccgaaaacgggtgtcgggtgcatacaaagcacgagtttttgccaccggaaccatttcttcgtttttcgcaacgaacatgcccaatccactactttaggtccaaaactcatgtttggggtggtttcgcgcaatttcgttgtcgcacgtcacacattacgaaaacgggttatcggggtgcatacaaagcacgagtttttgccaccggaaccatttcttcgtttttcgcaacgaacatgcccaatccactactttaggtccaaaactcatgtttggggtggtttcgcacaatttcgttatcgcacgtcacccattccgaaaacgggtgtcgggtgcatacaaagcacgagtttttgccaccggaaccatttcttcgttttttgcaacgaacatgcccaatccactactttaggtccaaaactcatgtttggggtggtttcgcgcaatttcgttgtcgcacgtcacacattacgaaaacgggatatcggggtgcatacaaagcacgagtttttgccaccggaaccatttcttcgtttttcgcaacgaacatgcccaatccactactttaggtccaaaactcatgtttggggtagtttcgcgtaatttcgttgtcgcacgtcacccattccgaaaacgggtgtcggggtgcatacaaagcacgagtttttgccagcggaaccatttcttcgtttttcgtaacgaacatgcccaatccactactttaggtccaaaactcatgtttgaggtggtttcgcgcaatttcgttgtcgcacgtcaaccattcagaaaacaggtatcgaggtgcataaaagcacgagtttttgccaccggaaccatttcttcgtttttcgcaacgaacatgcccaatccactactttaggtccaaaactcatgtttggggtggtttcacgcaatttcgttgtcgcacgtcacacattacgaaaacgggatatcggggtgcatacaaagcacgagtttttgccaccggaaccatttcttcgtttttcgcaacgaacatgcccaatccactactttaggtccaaaactcatgtttggggttgtttcgcgtaatttcgttgtcgcacgtcacccattccgaaaacgggtgtcggggtgcatacaaagcacgagtttttgccagcggaaccatttcttcgtttttcgcaacgaacatgcccaatccactactttaggtccaaaactctagtttgaggtggtttcgcgcaatttcgttgtcgcacgtcacccattctgaaaacaggtatcgaggtgcataaaagcacgagtttttgccaccggaaccatttcttggtttttcgcaacgaacatgcccaatccactactttaggtccaaaactcatgtttggggtggtttcgcgcaatttcgttgtctcacgtcaccctttccgaaaacgggtgtcgggtgcatacaaagcacgagtttttgccaccggaaccatttcttcgtttttcgcaacgaacatgcccaatccactactttaggtccaaaactcatgtttggggtggtttcgcgcaatttcgttgtcgcacgtcacacattccgaaaacgggttgtcggggtgcatacaaagcacgagtttttgccaccggaaccatttcttcgtttttcgcaacgaacatgcccaaaccactactttaggtccaaaacttatgtttggggttgtttcgcgcaatttcgttatcgcatcaaggaaacgataccgtcgacctcgcgggtggataatacccattcccctaagtgagtcgatacgcgcgtc

SEQ ID NO: 598 - DNA, 2834 bp, Zea mays
  source (0)...(0): Zea mays BAC clone full insert sequence contig bacm.pk128.j21.fis8
tacttagaatgttcgttgcgaaaaacgacgaaatggttccgctggcaaaaactcgtgctttgtatgcacccgacacccgttttcggaatgtgtgacgtgcgacaacgaaattgcgcgaaaccaccccaaacatgagttttggacctaaagtagtggattgggcatgttcgttgcgaaaaacgaagaaatggttccggtggcaaaaactcgtgctttgtatgcaccccgacaacccgttttcggaatgtgtgacgtgcgacaacgaaattgcacgaaaccaccccaaacatgagttttggacctaaagtagtggattgggcatgttcgttgcaaaaaacgaagaaatggttccggtggcaaaaactcgtgctttgtatgcaccccgacaacccgttttcggaatgtgtaacgtgcgacaacaaaattgcgcgaaaccaccccaaacatgagttttggacctaaagtagtggattgggcatgttcgttgcgaaaaacgaagaaatggttccggtggcaaaaactcgtcctttgtatgcacccgacacccgttttcggaatgggtgacgtgcgacaacgaaattgcgcgaaaccaccccaaacatgagttttggacctaaagtagtggattgggcatgttcgttgcgcaaaacgaagaaatggttccggtggcaaaaactcgtgcttttatgcacatcgatacctgttttcagaatgggtgacgtgcgacaacgaaattgcgcgaaaccacctcaaacaagagttttggacctaaagtagtggattgggcatgttcgttgcgaaaaacgaagaaatggttccgctggcaaaaactcgtgctttgtatgcaccccgacacccgttttcggaatgggtgacgtgcgacaacgaaattgcgcgaaaccaccccaaacatgagttttggacctaaagtagtggattgggcatgttcgttgcgaaaaacgaagaaatggttccggtggcaaaaactcgtgcttttatgcacctcgatacctgttttcagaatgggtgacgtgcgacaacgaaattgcgcgaaaccatctcaaacatgagttttggacctaaagtagtggattgggcatgttcgttacgaaaacgaagaaatggttccgctggcaaaaactcgtgctttgtatgcaccccgacacccgttttcggaatgggtgacgtgcgataacgaaattacgcgaaacaaccccaaacatgagttttggacctaaagtagtggattgggcatgttcgttgcgaaaaacgaagaaatggttccggtggcaaaaactcgtgctttgtatgcaccccgataacccgttttcggaatgtgtgacgtgcggcatcgaaattgcgcgaaaccaccccaaacatgagttttggacctaaagtagtggattgggcatgttcgttgcgaaaaacgaagaaatggttccggtggcaaaaactcgtgctttgtatgcacccgacacccgttttcggaatgggtgacgtgcgataacgaaattgcgcgaaaccaccccaaacatgagttttggacctaaagtagtggattgggcatgttcgttgcaaaaaacgaagaaatggttccggtggcaaaaactcgtgctttgtatgcacaccgacacctgttttcagaatggttgacgtgcgacaatgaaattgcgcgaaaccacctcaaacatgagttttggacctaaagtagtggattgggcatgttcgttgcgaaaaacgaagaaatggttccgctggcaaaaactcgtgctttgtatgcaccccgacacccgttttcggaatgggtgacgtgcgacaacgaaattgcgcgaaaccaccccaaacatgagttttggacctaaagtagtggattgggcatgttcgttgcgaaaaacgaagaaatggttcaggtggcaaaaactcgtgctttgtgcacccgacacccgtttttggaatgggtgacgtgtgacaacgaaattgcgcgaaaccaccccaaacatgagttttggacctaaagtagtggattgggcatgttcgttgcgaaaaacgaagaaatggttccggtggaaaaaactcgtgctttatctgcacccgacacccgttttcggaatgggtgacgtgcggcaacgaaattgtgcgaaaccaccccaaacatgagttttggacctaaagtagtggattgggcattttcgttgggaaaaacgaagaaatggttccggtggcaaaaactcgtgctttgtatgcaccccgacacccattttcggaatgggtgacgtgcggcaacgaaattgcacgaaacctacccaaacatgagttttggacctaaagtagtggattgggcatgttcgttgcgaaaaacgaagaaatggttctgggggcaaaaactcgtgcttttatgcaacccgatacccgttttcagaatgggtgacgtgcgacatcaaaattgcgcgaaacctccccaaacatgagttttggacctaaagtagtggattaggcatgttcgttgtgaaaaacgaagaaatggttccggtggaaaaaaactcgtgctttgtatgcaccccgacacccgttttcagaatgggtgacgtgcggcaacgaaattgcgagttttggacctaaagtagtggattgggcatgttcgttgcgaacaacgaagaaatggttccggtggcaaaaactcgtgctttgtatgcaccccgacaaccattttcggaatgggtgacgtgcgacaacgaaattgcgcgaaatctccccaaacatgagttttggacctaaagtagtggaataggcatgttcgttgcgaaaaacgaagaaatggttccggtggcaaaaaa

SEQ ID NO: 599 - DNA, 5385 bp, Zea mays
  source (0)...(0): Zea mays BAC clone full insert sequence contig bacm.pk128.j21.fis9
cacgaagaggaaccttcggccatcttatacaaacagcttcagccgaagaccgcttcttcctataagaccttcggcgacgaagcatagacccaacaattagttttggacctaaactagtggattgggcatgttcgttgcgaaaaacgacgaaatggttccgctggcaaaaactcgtgctttgtatgcacccgacacccgttttcggaatgtgtgacgtgcgacaatgaaattgcgcgaaaccaccccaaacatgagttttggacctaaagtagtggattgggcatgttcattgcgaaaaacaaagaaatgattccggtggcaaaaactcgtgctttgtatgcaccccgacaacccgttttcggaatgtgtgacgtgcgataacgaaattgcgcgaaacaaccccaaacatgagttttggacctaaagtagtggtttgggcatgttcgttgcgaaaaacgaagaaatggttccggtggcaaaaactcgtgctttgtatgcaccccgacaacccgttttcggaatgtgtgacgtgcgacaacgaaattgcgcgaaaccacccccaaacatgagttttggacctaaagtagtggattgggcatgttcgttgcgaaaaacgaagaaatggttccggtggcaaaaactcgtgctttgtatgcacccgacacccgttttcggaaagggtgacgtgagacaacgaaattgcgcgaaaccaccccaaacatgagttttggacctaaagtagtggattgggcatgttcgttgcgaaaaacgaagaaatggttccggtggcaaaaactcgtgcttttatgcacctcgatacctgttttcagaatgggtgacgtgcgacaacgaaattgcgcgaaaccacctcaaactagagttttggacctaaagtagtggattgggcatgttcgttgcgaaaaacgaagaaatggttccgctggcaaaaactcgtgctttgtatgcaccccgacacccgttttcggaatgggtgacgtgcgacaatgaaattgcgcgaaaccaccccaaacatgagttttggacctaaagtagtggattgggcctgttcgttgcaaaaacgaagaaatggttccggtggcaaaaactcgtgctttgtatgcaccccgacaacccgttttcggaacgtgtgacgtgcgacaacgaaattgcgcgaaaccaccccaaacatgagttttggacctaaagtagtgggttgggcatgttcgttgcgaaaaacaaagaaatggttccggtggcaaaaactcgtgctttgtatgcacccgacactcgttttcggaatgggtgacgtgcgacaacaaaattgcgcgaaaccaccccaaacatgagttttggacctaaagtagtggattgggcatgttcgttgcgaaaaacgaagaaatggttctggtggcaaaaactcgtgcttttatgcacctcgatacctgttttcagaatgggtgacgtgcgacaacgaaattgcgcgaaaccacctcaaacatgagttttggacctaaagtagtggattgggcatgttcgttacgaaaacgaagaaatggttccgctggcaaaaactcgtgctttgtatgcaccccgacacccgttttcggaatgggtgacgtgcgataacgaaattacgcgaaacaaccccaaacatgagttttggacctaaagtagtggattgggcatgttcgttgcgaaaaacgaagaaatggttccggtggcaaaaactcgtgctttgtatgcaccccgataacccgttttcggaatgtgtgacgtgcgacaacgaaattgcgcgaaaccaccccaaacatgagttttggacctaaagtagtggattgggcatgttcgttgcgaaaaacgaagaaatggttccggtggcaaaaactcgtgctttgtatgcacccgacacccgtttttggaaagggtgacgtgcgataacgaaattgcgcgaaaccaccccaaacatgagttttggacctaaagtagtggattgggcatgttcgttgcgaaaaacgaagaaatggttccagtggcaaaaactcgtgcttttatgcacctcgatacccgttttcagaatgggtgacgtgcgacaacgaaattgcacgaaaccacctcaacattagttttggacctaaactagtggattgggcatgttcgttgcgaaaaacgacgaaatggttccgctggcaaaaactcgtgctttgtatgcacccgacacccgttttcggaatgtgtgacgtgcgacaacgaaattgcgtgaaaccaccccaaacatgagttttggacctaaagtagtggattgggcatgttcgttgcgaaaaacgaagaaatggttccggtggcaaaaactcgtgctttgtatgcaccccgacaaccgtttcggaatgtgtgacgtgcgataacggaattgcgcgaaacaaccccaaacataagttttggacctaaagtagtggtttgggcatgttcgttgcgaaaaacgaagaaatggttccggtggcaaaaactcgtgctttgtatgcaccccgacaacccgttttcggaatgtgtgacgtgcgacaacgaaattgcgcgaaaccaccccaaacatgagttttggacctaaagtagtggattgggcatgttcgttgcgaaaaacgaagaaatggttccggtggcaaaaactcgtgcttttatgcacctcgatacccgttttcagaatgggtgacgtgcgacaacgaaattgcgcgaaaccacctcaacattagttttggacctaaactagtggattgggcatgttcgttgcgaaaaacgacgaaatggttccgctggcaaaaactcgtgctttgtatgcacccgacacccgttttcggaatgtgtgacgtgcgacaacgaaattgcgtgaaaccaccccaaacatgagttttggacctaaactagtggattgggcatgttcgttgcgaaaaacgaagaaatggttccggtggcaaaaactcgtgctttgtatgcaccccgataacccgttttcggaatgtgtgacgtgcgacaacgaaattgcgcgaaacccccccaaacatgagttttggacctaaagtagtggattgggcatgttcgttgcgaaaaacgaagaaatggttccggtggcaaaaactcgtgctttgtatgcacccgacacccgttttcggaaagggtgacgtgcgaaacgaaattgcgcgaaaccaccccaaacatgagttttggacctaaagtagtggattgggcatgttcgttgcgaaaaacgaagaaatggttccggtggcaaaaactcgtgctttgtatgcaccccgacacccgttttcggaaagggtgacgtgcgacaacgaaattgcgcgaaaccaccccaaacatgagttttggacctaaagtagtggattgggcatgttcgttgcgaaaaacgaagaaatggttccggtggcaaaaactcgtgcttttatgcacctcgataccagttttcagaatggttgacgtgcgacaacgaaattgcgcgaaaccacctcaaacatgagttgtggacctaaagtagtggattgggcatgttcgttacgaaaaacgaagaaatggttccgctggcaaaaactcgtgctttgtatgcaccccgacacccgttttcggaatgtgtgacgtgcgacaacgaaattgcgcgaaaccacccccaaacatgagttttggacctaaagtagtggattgggcatgttcgttgcgaaaaacgaagaaatggttccggtggcaaaaactcgtgctttgtatgcacccgacacccgttttcggaaagggtgacgtgagacaacgaaattgcgcgaaaccaccccaaacatgagttttggacctaaagtagtggattgggcatgttcgttgcgaaaaacgaagaaatggttccggtggcaaaaactcgtgcttttatgcacctcgatacctgttttcagaatgggtgacgtgcgacaacgaaattgcgcgaaaccacctcaaactagagttttggacctaaagtagtggattgggcatgttcgttgcgaaaaacgaagaaatggttccgctggcaaaaactcgtgctttgtatgcaccccgacacccgttttcggaatgggtgacgtgcgacaacgaaattgcgcgaaaccaccccaaacatgagttttggacctaaagtagtggattgggcatgttcgttgcgaaaaacgacgaaatggttccggtggcaaaaactcgtgctttgtatgcacccgacacccgttttcggaatgccacgtgcgacaatgaaattgcgcgaaaccaccccaaacatgagttttggacctaaagtagtggattgggcctgttcattgcaaaaaacgaagaaatggttccggtggcaaaaactcgtgctttgtatgcacccgacacccgttttcggaaagggtgacgtgcgacaacgaaattgcgtgaaaccaccccaaacatgagttttggacctaaagtagtggattgggcatgttcgttgcgaaaaacgaagaaatggttccggtggcaaaaactcgtgctttgtatgcaccccgacaaccgttttcggaatgtgtgacgtgcgataacgaaattgcgcgaaacaaccccaaacataagttttggacctaaagtagtggtttgggcatgttcgttgcgaaaaacgaagaaatggttccggtggcaaaaactcgtgctttgtatgcaccccgacaacccgttttcggaatgtgtgacgtgcgacaacgaaattgcgcgaaaccaccccaaacatgagttttggacctaaagtagtggattgggcatgttcgttgcgaaaaacgaagaaatggttccggtggcaaaaactcgtgctttgtatgcacccgacacccgttttcggaaagggtgacgtgcgacaacgaaattgcgcgaaaccacctcaaacatgagttttggacctaaagtagtggattgggcatgttcgttgcgaaaaacgaagaaatggttccggtggcaaaaactcgtgctttgtatgcaccccgacacccgttttcggaatgggtgacgtgcgacaacgaaattgcgcgaaaccaccccaaacatgagttttggacctaaagtagtggattgggcatgttcgttgcgaaaaacgaagaaatggttccggtggcaaaaactcgtgcttttatgcacctcgatacctgttttcagaatggttgacgtgcgacaacgaaattgcgcgaaaccacctccaacatgagttttggacctaaagtagtggattgggcatgttcgttacgaaaaacgaagaaatggttccgctggcaaaaactcgtgctttgtatgcaccccgacacccgttttcagaatgggtgacgtgcgataacgaaattacgcgaaacaaccccaaacatg

SEQ ID NO: 600 - DNA, 6204 bp, Zea mays
  source (0)...(0): Zea mays BAC clone full insert sequence contig bacm.pk128.j21.fis10
cgtttttcgcaacgaacatgcccaatccactactttaggtcccaaactcatgtttggggtggtttcgcgcaatttcgttgtcgcacgtcaccctttccgaaaacgggtgtcgggtgcatacaaagcacgagtttttgccaccggaaccatttcttcgtttttcgcaacgaacatgcccaatccactactttaggtccaaaactcatgtttggggtggtttcgcgcaatttcgttgtcgcacgtcaccctttccgaaaatgggtgtcgggtgcatacaaagcacgagtttttgccaccggaaccatttcttcgtttttcgcaacgaacatgcccaatccagtactttaggtccaaaactcatgtttggggtggtttcgcgcaatttcgttgtcacacgtcacacattccgaaaacgggttgtcggggtgcatacaaagcacgagtttttgccaccggaaccatttcttcgtttttcgcaacgaacatgcccaaaccactactttaggtccaaaacttatgtttggggttgtttcgcgcaatttcgttatcgcacgtcacacattccgaaaacggttgtcggggtgcatacaaagcacgagtttttgccaccggaaccatttcttcgtttttcgcaacgaacatgcccaatccactactttaggtccaaaactcatgtttggggtggtttcacgcaatttcgttgtcgcacgtcacacattccgaaaacgggtgtcgggtgcatacaaagcacgagtttttgccagcgagaaccatttcgtcgtttttcgcaacgaacatgcccaatccactactttaggtccaaaactcatgtttgaggtggtttcgcgcaatttcgttgtcgcacgtcacccattctgaaaacaggtatcgaggtgcataaaagcacgagtttttgccaccggaaccatttcttcatttttcgcaacgaacatgctcaatccactactttaggtccaaaactcatgtttggggtggtttcgcgcaatttcgttgtcgcacgtcacgctttccgaaaacgggtgtcgggtgcatacaaagcacgagtttttgccaccggaaccatttcttcgtttttcgcaacgaacatgcccaatccactactttaggtccaaaactcatgtttggggtggtttcgcgcaatttcgttgtcgcacgtcacacattacgaaaacgggttatcggggtgcatacaaagcacgagtttttgacaccggaaccatttcttcgtttttcgcaacgaacatgcccaatccactactttaggtccaaaactcatgtttggggtggtttcacgcaatttcgttgtcgcacgtcacacattccgaaaacgggtgtcggggtgcatacaaagcacgagtttttgccagcggaaccatttcttcgtttttcgtaacgaacatgcccaatccactactttaggtccacaactcatgtttgaggtggtttcgcgcaatttcgttgtcgcacgtcaaccattctgaaaactggtatcgaggtgcataaaagcacgagtttttgccaccggaaccatttcttcgtttttcgcaacgaacatgcccaatccactactttaggtccaaaactcatgtttggggtggtttcgcgcaatttcgttgtcgcacgtcacccattccgaaaacgggtgtcggggtgcatacaaagcacgagtttttgccaccggaaccatttcttcgtttttcgcaacgaacatgcccaatccactactttaggtccaaaactcatgtttggggtggtttcgcgcaatttcgttgtcgcacgtcaccctttccgaaaacgggtgtcgggtgcatacaaagcacgagtttttgccaccggaaccatttcttcgtttttcgcaacgaacatgcccaatccactactttaggtccaaaactcatgtttggggtggtttcgcgcaatttcaatgccgcacgtcacacattccgaaaacgggttgtcggggtgcatacaaagcacgattttttgccaccagaaccatttcttcttttttcgcaacgaacatgcccaatccactactttaggtccaaaactcatgtttggggtggtttcgcgcaattttgttgtcgcacgtcacccattccgaaaacggttgtcggggtgcatacaaagcacgagtttttgccaccggaaccatttcgtcgtttttcgcaacgaacatgcccaatccactactttaggtccaaaactcatgtttggggtggtttcgcgcaatttcgttgtcgcacgtcacccattccgaaaacgggtgtcggggtgcatacaaagcacgagtttttgccagcggaaccatttcttcgtttttcgcaacgaacatgcccaatccactactttaggtccaaaactctagtttgaggtggtttcgcgcaatttcgttgtcgcacgtcacccattctgaaaacaggtatcgaggtgcataaaagcacgagtttttgccaccggaaccatttcttcgtttttcgcaacgaacatgcccaatccactactttaggtccaaaactcatgtttggggtggtttcgcgcaatttcgttgtctcacgtcaccctttccgaaaacgggtgtcgggtgcatacaaagcacgagtttttgccaccggaaccatttcttcgtttttcgcaacgaacatgcccaatccactactttaggtccaaaactcatgtttggggggggtttcgcgcaatttcgttgtcgcacgtcacacattccgaaaacgggtgtcggggtgcatacaaagcacgagtttttgccagcggaaccatttcttcttttttcgcaacgaacatgcccaatccactactttaggtccaaaactcatgtttggggtggtttcgcgcaatttcgttgtcgcacgtcacccattccgaaaacgggtgtcggggtgcatacaaagcacgagtttttgccagcggaaccatttcttcgtttttcgcaacgaacatgcccaatccactactttaggtccaaaactctagtttgaggtggtttcgcgcaatttcgttgtcgcacgtcacccattatgaaaacaggtatcgaggtgcataaaagcacgagtttttgccaccggaaccatttcttcgtttttcgcaacgaacatgcccaatccactactttaggtccaaaactcatgtttggggtggtttcgcgcaatttcgttgtctcacgtcaccctttccgaaaacgggtgtcgggtgcatacaaagcacgagtttttgccaccggaaccatttcttcgtttttcgcaacgaacatgcccaatccactactttaggtccaaaactcatgtttggggtggtttcgcgcaatttcgttgtcgcacgtcacacattctgaaaacgggttgtcggggtgcatacaaagcacgagtttttgccaccggaaccatttcttcgtttttcgcaacgaacatgcccaaaccactactttaggtccaaaactcatgtttggggtggtttcgcgcaatttcgttgtcgcacgtcgcacattccgaaaacgggttgtcggggtgcatacaaagcacgagtttttgccaccggaaccatttcttcgtttttcgcatcgaacatgcccaaaccactactttaggtccaaaacttatgtttggggttgtttcgcgcaatttcgttatcgcacgtcacacattccgaaaacggttctcggggtgcatacaaagcacgagtttttgccaccggaaccatttcttcgtttttcgcaacgaacatgcccaatccactactttaggtcgaaaactcatgtttggggtggtttcgcgcaatttcgttgtcgcacgtcacacattccgaaaacgggttgtcgggatgcataaaagcacgagtttttgccaccggaaccatttcttcgtttttcgcaacgaacattcccaaaccactactttaggtccaaaacttatgtttggggttgtttcgcgcaatttcgttatcgcacgtcacacattccgaaaacggttgtcgggtgcatacaaagcacgagtttttgccaccagaaccatttcttcgtttttcgcaacgaacatgcccaatccactactttaggtccaaaactcatgtttggggtggtttcgcgcaatttcgttgtcgcacgtcacacattccgaaaacgggttgtcggggtgcatacaaagcacgagtttttgccaccggaaccatttcttcgttttttgcaacgaacatgcccaatccactactttaggtccaaaactcatgtttggggtggtttcgcgcaatttcattgtcgcacgtcacccattccgaaaacgggtgtcgggtgcatacaaagcacgagtttttgccaccggaaccatttcgtcgtttttcgcaacgaacatgcccaatccaatactttaggtccaaaactcatgtttggggtggtttcgcgcaatttcgttgtcgcacgtcacccattccgaaaacgggtgtcggggtgcatacaaagcacgagtttttgccagcggaaccatttcttcgtttttcgcaacgaacatgcccaatccactactttaggtccaaaactctagtttgaggtggtttcgcgcaatttcgttgtcgcacgtcacccattctgaaaacaggtatcgaggtgcataaaagcacgagtttttgccaccggaaccatttcttcgtttttcgcaacgaacatgcccaatccactactttaggtccaaaactcatgtttggggtggtttcgcgcaatttcgttgtctcacgtcaccctttccgaaaacgggtgtcgggtgcatacaaaacacgagtttttgccaccggaaccatttcttcgtttttcgcaatgaacatgcccaatccactactttaggtccaaaactcatgtttggggtggtttcgcgcaatttcattgtcgcacgtcacacattccgaaaacgggtgtcgggtgcatacaaagcacgagtttttgccagcggaaccatttcgtcgattttcgcaacgaacatgcccaatccactagtttaggtccaaaactaattttgaggtggtttcgcgcaatttcgttgtcgcacgtcacccattctgaaaacgggtatcgaggtgcataaaagcacgagtttttgccaccggaacgattccttcgtttttcgcaacgaacatgccgactttaggtccaaaactcatgtttggggtggtttcgcgcaatttcgttgtcgcacgtcaccctttccgaaaatgggtgtcgggtgcatagaaagcacgagtttttgccaccggaaccatttcttcgtttttcgcaacgaacatgcccaatccactactttaggtccaaaactctagtttgaggtggtttcgcgcaatttcgttgtcgcacgtcacccattctgaaaacaggtatcgaggtgcataaaagcacgagtttttgccacaggaaccatttcttcgtttttcgcaacgaacatgcccaatccactactttaggtccaaaactcatgtttggggtggtttcgcgcaatttcgttgtctcacgtcaccctttccgaaaacgggtgtcgggtgcatacaaagcacgagtttttgccaccggaaccatttcttcgtttttcgcaacgaacatgcccaatccactactttaggtccaaaactcatgtttgggggtggtttcgcgcaatttcgttgtcgcacgtcacacattccgaaaacgggttgtcggggtgcatacaaagcacgagtttttgccaccggaaccatttcttcgtttttcgcaacgaacatgcccaaaccactactttaggtccaaaactcatgtttggggttgtttcgcgcaatttcgttatcgcacgtcacagattccgaaaacgggttgtcggggtgcatacaaagcacgagtttttgccaccggaaccatttcttcgtttttcgcaacgaacatgcccaatccactactttagttccaaaactcatgtttggggtggtttcgcgcaatttcattgtcgcacgtcacacattccgaaaacgggtgtcgcgtgcatacaaagcacgagtttttgccagcggaaccatttcgtcgtttttcgcaacgaacatgcccaatccactagtttaggtccaaaactaattgttgggtctatgcttcgtcgccgaaggtcttataggaagaagcggtcttcggctgaagctgtttgtataagatggccgaaggttcct

SEQ ID NO: 601 - DNA, 3464 bp, Zea mays
  source (0)...(0): Zea mays BAC clone full insert sequence contig bacm.pk128.j21.fis11
tggaaatagtcctcaacagattgagaaccttgctgaaaacgctgcattttattaagcaaatcacgagcataatacgaaggcacaaatcgatgtcgcatcgcagctttcaactgatcccaagtggttggaatggtagtgggatgttttattttaaactcacgccaccaaattaaagcaaaatcagtaaattcactaatagcagctttaacctgagaatgtgcagcaatatcatggcatgaaaatttttgttcaacctctaactcccaatcaagatatgcagcaggatcatatttgccattaaaaggtggaattttaaatttaatcttagaaaataagtcattagggggattacgaaccacacggcgtgcacgaccacggcgatctccatcgtcccactcagtgtcaccgccgtagtcctgctccatctttgtggtcaacgcatcaaggcgtgctaggatggtgtcgagtgtggtgcgagtcgccgtttgagcaaggtcaagctggttgaaacgctcggtcgtcgaagtgaccgttgaatcaagccgttcatgcatcgtcctaatgtcatcagcaagtccatcaacttgtccctttacttccagcaactgggcatccaccgtgtcatgtgctcctgccatagttagcgcaaacaccaaaacaccaaaaaaaacgacaaaaacaggggtgtactgctcacaaggcgctcacactagtgctgttatcaaattcttatccgttcttaccaagccacagtggtgaactgcaaccaacaggtggaaccggtgaaagattggatgagcgattgcctggagaaacagaaacctactcgttgtagaaatatgtggagttctgggtaggctgcactcaagtcaaggattagcacgaccaaacaataatgcaaagttgaattatagtgcaaaacacgaaactatattgctggccacaagtgcaaaggacggatggaactagcagaatggcagtaccgtaaatattgtactagcgaggccactagtaggaatcacaagtgattttgtttttcttttttgtatgatttttttggtatttttctcagcacaagaagcaacaaaataggagctacacgaagtttcacctaaaacagagttcaaatgtggtctacagaaaatcagaaagttctctaaaaagcgtgcgagaactttgaaggattttttctttattttcctgaattttttttgacaattttgtcgaacccaaacagaccgaaggtcagtttggccggcctcagaatggtgtcaactagctcctgtaaaaatttcagatttttcggacacccgagcgaaaagttatgcccggtttaaggaaggtacctcaagttatgttttcaaacgaccgggatgaaacaaccgtatcctttctccttcgttgttttttttgtttctgttttttttgacgtaaccgaaggagaaaaacaaggaaacgatgttgactcggttttttttttctgtttttttttcgtaaccgaaggagaaaaacaaggaaacggccgttgactcggtttgttttttctgttttttttttgacgtaaccgaaggagaaaaacaaggaaacaatgttgactcggtttgtggcgtgatcaaagaggagatggtggcggcgctaggatttgaatggtggaagaacacaatgcaaccagcaacaaatgacgcgaaagcacacaaattcaacaatgcagattattgaaagaaagtgcgaggctcaaaagggtgctcggataaggtctaacctgaatttttatgtggttttgtggactgtaggaaaaaaaaactcgataaactcaccgatcaacctggaaatctgataccaattgatgaagctgaggtgcccgatctttcggcgagtagagataattccgatttggcggaagatgacccttgcgatccgactacgacgagcaagcccgaggcgccaatgcaatcgctgaaccaactccctgtggttaccgaccttgctgatgcgagatcggcctgatcacgaagatcgtttcctgtgcgcaatcgaagaacgaacaagaacaagatgcgagcaatctaatctattactcgaaggtggagttctgaatacacgaagacagcgcagatttgcgcgtgttcgagagtagctaaggctaacgtaaaacaaaactcggaaaataaaggaggcgcagctcctgtataaatagagagggggcgcagccctaggggcggccaaccctaggtcgtccataatgggccgcaattgggctggtcgtctattcttctgggccttcgttctttaacaacatgatgtagttcaattctcttgcacgggcccgagtcactggcccaggtggaaggggtggcgcctggactggggaagatggtgcctgggctggagaaggtgctgctggtgtagatgtgctcgtgttggtgttgatgtcctcatcacatcacaatcaacaaaatcagaataagcacccatggagaaaggaactcgcacggaacgcgtgatttttattttaccaccatcattaagccattgaatgtgatatgggtttggatgcttacgagtgggtaacgacaacttttcgaccagcatggtactcgccaaattgttgcaactgccgctgtcgataatgatgcgaattgaccgctcctgcacaacaccctttgtatggaacagagtgtgtcgctgattcttctcgggcaaagcgacctgtgtactaagaacacgctgcacaacaagactttcatacctatcagcgtcgcccgggttgacatgtacctccgccttagctgcatggtcagtggcaagtagtgcatgttcaatttcttcagaatcactagcggaagagtactcaccatcgtcacgaatgagtaaagtgcgcttgtttgggcagtcccgaatcacatggccaaatcctctacagcgatgacactgaatatcccgtgtacgacctgtgggtgcggcagtgctggctggtttggtcgtcttctcgcgtggagtagtggtggacgtggatggcgcagggggaactggtgctgaggtggatgtcgagcttcgtcctgcaaaagggttagaatatggcttcgagcggcgtccctgcacttcacgttcagctttgcaagcatattcaaataaagtagtcatatcataatattccttataatcaagtatatcttggatttcgcggtttaaaccaccacgaaaacgtgccatagcagcgtcgttgtcctccaatatcccacaacgaatcatacctttttgtaactcctggaaatagtcctcaacagattgagaaccttgctgaaaacgctgcattttattaagcaaatcacgagcataatacgaaggcacaaatcgatgtcgcatcgcagctttcaactgatcccaagtggttggaatggtagtgggatgttttattttaaactcacgccaccaaattaaagcaaaatcagtaaattcactaa

SEQ ID NO: 602 - DNA, 9006 bp, Zea mays
  source (0)...(0): Zea mays BAC clone full insert sequence contig bacm.pk128.j21.fis12
aaattgcgcgaaacaaccccaaacataagttttggacctaaagtagtggtttgggaatgttcgttgcgaaaaacgaagaaatggttccggtggcaaaaactcgtgcttttatgcatcccgacaacccgttttcggaatgtgtgacgtgcgacaacgaaattgcgcgaaaccaccccaaacatgagttttcgacctaaagtagtggattgggcatgttcgttgcgaaaaacgaagaaatggttccggtggcaaaaactcgtgctttgtatgcacccgacacccgttttcggaaagggtgacgtgcgacaacgaaattgcgcgaaaccaccccaaacatgagttttggacctaaagtagtggattgggcatgtttgttgctgatgtagctgaggtgcccgatctttcggcgagtagagataattccgatttggcggaagatgacccttgcgatccgactacgacgagcaagcccgaggcgccaatgcaatcgctgaaccaactccctgtggttaccgaccttgctgatgcgagatcggcctgatcacgaagatcgtttcctgtgcgcaatcgaagaacgaacaagaacaagatgcgagcaatctaatctattactcgagggtggagttctgaatacacgaggacagcgcagatttgcgcgtgttcggaagtagctaaggctaacgtaaaacaaaactccccaaaaataaaggaggcgcagctcctgtataaatagagagggggcgcagcccctaggggcggccaaccctaggtcgtccattatgggccgcaattgggctggtcgtctatccttccgggccttcgttctttaacaacatgatgtagttcaattctcttgcacgggcccgagtcactggcccaggtggaaggggtggcgcctgggctggagaaggtgctgctggtgtagatgtgctcgtgttggtgttgatgtcctcatcatcctccccttcttgaactgaagtcgtcctcgacggcaactcctcatcttctcccgcatacggtttcaaatctgcaacattaaaactagtggaaacaccaaactccgcaggcaggtcaaggatataagcattatcattaatcttggttagtaccttaaaaggaccagcagcacgaggcatcaatttagaacggcgcaaagtaggaaaacgatcctttctcaaatgcaaccaaaccatatcaccaggttcaaaagtaactagtttccggcctttactaccagtaatctgatatttagcattagcagcagcaatgttttgttgagtttgttcatggagattaatcatttgttcaacatgtgcaagagcatctatgtgtggggcgtccgtagcatcaagcgaaaacaaagcaataggcgccctaggaatgtaaccataaacaatttgaaaagggcacatctttgtagaagaatgtgttgcatgattataagcaaactcaacatgaggtaagcaatcctcccaacgtttcaaatttttgtctaaaacagccctaagcatggtagacaaagttcgattaactacctcagtttgaccatcagtctgagggtgacaagtggtgctaaacagcaatttagttcctaatttattccacagagatctccaaaaatgactcagaaacttggcatcacgatccgagactattgtattgggaataccgtgcaaacgaataatctctctaaaaaacaattcagcaacattgctagcatcatcagtcttatgacaaggtatgaaatgagccattttggagaatcgatcaacaaccacaaaaatgctatccctccccttcttagttctaggcaatcccaaaacaaaatccatcgaaatatcaatccaagggaaagtaggaacaggcaaaggcatatacaaaccatggttgttcaaccgtgacttagctttctgacaagtagtgcagcgtgcaacaaggcgctcaacatcagcgcgcatccgaggccaaaagaagtgggcagccaacacctcatgtgtcttgtagacgccaaagtgccccatgagaccgcctccatgtgcttcctgtaacaacaaaagacgaaccgagctagctggaacacacagcttgttagcgcgaaacaggaacccatcctgtatgtgaaatttgccccatggtttcccattaatacaatggccgaaagcatctttaaaatcagcatcgtcaacatattgatcttttacagtgtgcaaaccaaagattttaaaatctaactgtgacagcatggtatagcgacgagacaaagcatcagcaataacattgtccttcccgttcttgtgtttaataatgtaaggaaaagactcaatgaattctacccatttagcatgacgacggttcagatttgtttgggtacgaatatgttttaaagcctcatgatcagaatgaattatgaactcacgatgccaaagatagtgctgccatgtatgtaaagtgcgcactaacgcgtaaagctccttatcataagtagaatatttcagactagcaccgcttaatttttcactaaaataagcaactggttttccttcttgtaataaaacagcacctagcccaataccgctagcatcgcattcaagctcaaatactttattaaaatcaggcaattgcaataggggagcttgggttaacttatctttcaaagtgctgaacgcttcctcctgcgaatcactccaagcaaatggcacatctttctttgtaagctcatgtagaggcgctgcaatggagctaaaatcacgaacaaatctgcggtagaaaccggcaagtccaagaaagctccgaatttgtgtgaccgtcgtcggtgtaggccactcccgaatggcagcaatcttgctgctatccacctcaatgccctgtggagtaacaacataaccaagaaacgagacacgtcgtgtgcaaaagatgcatttttccatgttagcgaataactgggcggcacgcaatgcatcaaaaacagcacttaaatgttccaaatgctctttcttagatttgctgtaaataaggatatcatcgaaataaacaaccacaaacaatcctatgaagggcctcagaacttcattcatcactcgcataaaagtgctgggagcattagtcaatccaaacggcataaccaaccattcatataaaccaaatttcgttttgaaggctgttttccattcatcacctagtttcattctaatctggtggtaaccactacgcaaatcaatcttagtgaaaataatggcaccactaagctcatctagcatatcatcaaggcgtggtataggatagcgataacgaatagtgatattattaatagcacgacagtctacacacatacgccatgacccatccttcttgggaacaagtaacacaggaacagagcaagggctaagagactcacgaatgtatcctttgtcaagcaacgcctttacctggcgctgaatctccttcgtctcatccggatttgtacggtatggtgcgcggtttggaagctgtgcaccgggaatgaggtcgatctggtgctcaatgccacgaagcggtgggagacccggtggtaagtctttgggaaagacatcagcgtactcctgcaaaaggttagcaaccatagggggaatagccaaagatggtgcatcatcaagtgaaatgaggacactagagcatacaagtgcatagcatggcaaatgagcaccgtgtagatcatcaaaatcagcacgtgtagcaagtaaaacaggagccttcaacttaatttcagaaggaacagagtgcgatggatcaagttgtttagcagttatagcagctcgggcaagatcatctttaacaatttgttcaggtgtcattggatgtataattattttctgacccttaaaaatgaaagaataatgattcgaacgaccatgatgcaagctatcagtatcatattgccaaggtcgaccaagtaacaaagagcatgcttccatgggaataacatcacaatcaacaaaatcagaataagcacccatggagaaaggaactcgcacggaacgcgtgatttttattttaccaccatcattaagccattgaatgtgatatgggttcggatgcttacgagtgggtaacgacaacttttcgaccagcatggtactcgccaaattgttgcaactgccgctgtcgataatgatgcgaattgaccgctcctgcacaacaccctttgtatggaacagagtgtgtcgctgattcttctcgggcaaagcgacctgtgtactgagaacacgctgcacaacaagactttcatacctatcagcgtcgcccgggttgacatgtacctccgccttagctgcatggtcagtggcaagtagtgcatgttcaatttcttcagaatcactagcggaagagtactcaccatcgtcacgaatgagtaaagtgcgcttgtttggacagtcccgaatcacatggccaaatcctctacagcgatgacactgaatatcccgtgtacgacctgtgggtggggcagtgctggctggtttggtcgtcttctcgcgtggagtagtggtggacgtggatggcgcagggggaactggtgctgaggtggatgtcgagcttcgtcctgcaaaagggttagaatattgcttcgagcggcgtccctgcacttcacgttcagctttgcaagcatattcaaataaagtagtcatatcataatattccttataatcaagtatatcttggatttcgcggtttaaaccaccacgaaaacgtgccatagcagcgtcgttgtcctccaatatcccacaacgaatcatacctttttgtaactcctggaaatagtcctcaacagattgagaaccttgctgaaaacgctgcattttattaagcaaatcacgagcataatacgaaggcacaaatcgatgtcgcatcgcagctttcaactgatcccaagtggttggaatggtagtgggatgttttattttaaactcacgccaccaaattaaagcaaaatcagtaaattcactaatagcagctttaacctgagaatgtgcagcaatatcatggcatgaaaatttttgttcaacctctaactcccaatcaagatatgcagcaggatcatatttgccattaaaaggtggaattttaaatttaatcttagaaaataagtcattagggggatgacgaaccacacggcgtgcacgaccacggcgatctccatcgtcccactcagtgtcaccgccgtagtcctgctccatctttgtggtcaacgcatcaaggcgtgccaggatggagtcgagtgtggtgcgagtcgccgtttgagcaaggtcaagctggttgaaacgctcggtcgtcgaagtgaccgttgaatcaagccgttcatgcatcgtcctaatgtcatcagcaagtccatcaacttgtccctttacttccagcaactgggcatccaccgtgtcatgtgctcctgccatagttagcgcaaacaccaaaacaccaaaaaaaacgacaaaaacaggggtgtactgctcacaaggcgctcacactagtgctgttatcaaattcttatccgttcttaccaagccacagtggtgaactgcaaccaacaggtggaaccggtgaaagattggatgagcgattgcctggagaaacagaaacctactcgtcgtagaaatatgtggagttctgggtaggctgcactcaagtcaaggattagcacgaccaaacaataatgcaaagttgaattatagtgcaaaacacgaaactatattgctggccacaagtgcaaaggacggatggaactagcagaatggcagtaccgtaaatattgtactagcgaggccactagtaggaatcacaagtgattttgtttttcttttttgtatgatttttttgatatttttctcagcacaagaagcaacaaaataggagctacacgaagtttcacctaaaacagagttcaaatgtggtctacagaaaatcaggaagttctctgaaaagcgtgcgagaactttgacggatttttttctttattttcctgaatttttttgacaattttgtcgaacccaaacagaccgaaggtgagtttggccggcctcagaatggtgtcaactagctcctgtaaaaatttcagatttttcggacacccgagcgaaaagttatgcccggtttaaggaaggtacctcaagttatgttttcaaacgaccgggatgaaacaaccgtatcctttctccttcgttgtttttttttgtttctgttttttttttgacgtaaccgaaggagaaaaacaaggaaacgatgttgcctcggtttttttttttctgttttttttcgtaaccgaaggagaaaaacaaggaaacggccgttgactcggtttgttttttctgtttttttttacgtaaccgaaggagaaaaacaaggaaacaatgttgactcggtttgtggcgtgatcaaaggggagatggtggcggcgctaggatatgaatggtggaagaacacaatgcaaccagcaacaaggaaacgcgaaagcacacaaattcaacaatgcagattattgaaagaaagtgcgaggctcaaaagggtgctgggataagaactaacctgaatttttatgtggttttgtggactgtaggaaaaaaaacgctcgataaactcaccgatcaacctggaaatctgataccaattgatgtagctgaggtgcccgatctttcggcgagtagagataattccgatttggcggaagatgacccttgcgatccgactacgacgagcaagcccgaggtgccaatgcaatcgctgaaccaactccctgtggttaccgaccttgctgatgcgagatcggcctgatcacgaagatcgtttcctgtgcgcaatcgaagaacgaacaagaacaagatgcgagcaatctaatctattactcgagggtggagttctgaatacacgaggacagcgcagatttgcgcgtgttcggaagtagctaaggctaacgtaaaacaaaactcccaaaaataaaggaggcgcagctcctgtataaatagagagggggcgcagcccctaggggcggccaaccctaggtcgtccattatgggccgcaattgggctggtcgtctatccttccgggccttcgttctttaacaacatgatgtagttcaattctcttgcacgggcccgagtcactggcccaggtggaaggggtggcgcctgggctggagaaggtgctgctggtgtagatgtgctcgtgttggtgttgatgtcctcatcacatgtttggggtggtttcgcgcaatttcgttgtcgcacgtcacacattccgaaaacggttgtcggggtgcatacaaagcacgagtttttgacaccggaaccatttcttcgtttttcgcaacgaacatgcccaatccactacttgaggtccaaaactcatgtttggggtggtttcgcgcaatttcgttgtcgcacgtcacacattccgaaaacgggtgtcgggtgcatacaaagcacgagtttttgccagcggaaccatttcgtcgtttttcgcaacgaacatgcccaatccactggtttaggtccaaaactcatgtttggggtggtttcgcgcaatttcgttgtcgcacgtcacacattccgaaaacgggtgtcgggtgcatacaaagcacgagtttttgccagcggaaccatttcgtcgtttttcacaacgaacatgcccaatccactagtttaggtccaaaactaatgttgaggtggtttcgcggaatttcgttgtcgcacgtcacccattctgaaaacgggtatcgaggtgcataaaagcacgagtttttgccaccggaaccatttcttcgtttttcgcaacgaacatgcccaatccactactttaggtccaaaactcatgtttggggtggtttcgtgcaatttcgttgtcgcacgtcacacattccgaaaacgggttgtcggggtgcatacaaagcacgagtttttgccaccggaaccattgcttcgtttttcgcatcgaacatgcccaaacaactactttaggtccaaaacttatgtttggggttgtttcgcgcaatttcgttatcgcacgtcacacattccgaaaacggttgtcggggtgcatacaaagcacgagtttttgccaccggaaccatttcttcgtttttcgcaacgaacatgcccaatccactactttaggtccaaaactcatgtttggggtggtttcgcgcaatttcgttgtcgcacgtcaccctttccgaaaacgggtgtcgggtgcatacaaagcacgagtttttgccaccggaaccatttcttcgtttttcgcaacgaacatgcccaatccactactttaggtccaaaactcatgtttggggtggtttcgcgcaatttcgttgtcgcacgtcaccctttccgaaaacgggtgtcgggtgcatacaaagcacgagtttttgccaccggaaccatttcttcgtttttcgcaacgaacatgcccaatccactactttaggtccaaaactcatgtttggggtggtttcgcgcaatttcgttgtcgcacgtcacacattccgaaaacgggttgtcggggtgcatacaaagcacgagtttttgccaccggaaccatttcttcgtttttcgcaacgaacatgcccaaaccactactttaggtccaaaacttatgtttggggttgtttcgcgtaattccgttatcgcacgtcacacattccgaaaacggttgtcggggtgcatacaaagcacgagtttttgccaccggaaccatttcttcgtttttcgcaacgaacatgcccaatccactactttaggtccaaaactcatgtttggggtggtttcacgcaatttcgttgtcgcacgtcacacattccgaaaacgggtgtcggggtgcatacaaagcacgagtttttgccagcggaaccatttcttcgtttttcataacgaacatgcccaatccactactttaggtccacaactcatgtttgaggtggtttcgcgcaatttcgttgtcgcacgtcaaccattctgaaaactggtatcgaggtgcataaaagcacgagt

SEQ ID NO: 603 - DNA, 15483 bp, Zea mays
  source (0)...(0): Zea mays BAC clone full insert sequence contig bacm.pk128.j21.fis13
ttacgctagatgaaatggttccggtggcaaaaactcgtgcttttatgcacctcgataccagttttcagaatggttgacgtgcgacaacgaaattgcgcgaaaccacctcaaacatgagttgtggacctaaagtagtggattgggcatgttcgttacgaaaaacgaagaaatggttccgctggcaaaaactcgtgctttgtatgcaccccgacacccgttttcggaatgtgtgacgtgcgacaacgaaattgcgcgaaaccacccccaaacatgagttttggacctaaagtagtggattgggcatgttcgttgcaaaaaacaaaaaaatggttccggtggcaaaaactcgtgctttgtatgcacccgacacccgttttcggaaagggtgacgtgagacaacgaaattgcgcgaaaccaccccaaacatgagttttggacctaaaataggggattgggcattttcgttgccaaaaacgaagaaatggttccgggggcaaaaacttgtgcttttatgcaccccgacacccgttttcggaatgggtgacgtgcgacaacgaaattgcgcgaaaccaccccaaacatgagttttggacctaaagtagtggattgggcatgttcgttgcgaaaaacgacgaaatggttccggtggcaaaaactcgtgctttgtatgcacccgacacccattttcggaatgggtgacgtgcgacaatgaaattgcgcgaaaccaccccaaacatgagttttggacctaaagtagtggattgggcctgttcattgcaaaaaacgaagaaatggttccggtggcaaaaactcgtgctttgtatgcaccccgacaacccgttttcggaacgtgtgacgtgcgacaacgaaattgcgcgaaaccaccccaaacatgagttttggacctaaagtagtggattgggcatgttcgttgcgaaaaacaaagaaatggttccggtggcaaaaactcgtgctttgtatgcacccgacacccgttttcggaatgggtgacgtgcgacaacgaaattgcgcgaaaccaccccaaacatgagttttggacctaaagtagtggattgggcatgttcgttgcgaaaaacgaagaaatggttccggtggcaaaaactcgtgcttttatgcacctcgatacctgttttcagaatgggtgacgtgcgacaacgaaattgcgcgaaaccatctcaaacatgagttttggacctaaagtagtggattgggcatgttcgttacgaaaacgaagaaatggttccgctggcaaaaactcgtgctttgtatgcaccccgacacccgttttcggaatgggtgacgtgcgataacgaaattacgcgaaacaaccccaaacatgagttttggacctaaagtagtggattgggcatgttcgttgcgaaaaacgaagaaatggttccggtggcaaaaactcgtgctttgtatgcaccccgataacccgttttcggaatgtgtgacgtgcggcaacgaaattgcgcgaaaccaccccaaacatgagttttggacctaaagtagtggattgggcatgttcgttgcgaaaaacgaagaaatggttccggtggcaaaaactcgtgctttgtatgcacccgacacccgttttcggaaagggtgacgtgcgataacgaaattgcgcgaaaccaccccaaacatgagttttggacctaaagtagtggattgggcatgttcgttgcgaaaaacgaagaaatggttccggtggcaaaaactcgtgcttttatgcacctcgatacccgttttcagaatgggtgacgtgcgacaacgaaattgcgcgaaaccacctcaacattagttttggacctaaactagtggattgggcatgttcgttgcgaaaaacgacgaaatggttccgctggcaaaaactcgtgctttgtatgcacccgacacccgttttcggaatgtgtgacgtgcgacaacgaaattgcgtgaaaccaccccaaacatgagttttggacctaaagtagtggattgggcatgttcgttgcgaaaaacgaagaaatggttccggtggcaaaaactcgtgctttgtatgcaccccgacaaccgttttcggaatgtgtgacgtgcgacaacgaaattgcgcgaaacaaccccaaacataagttttggacctaaagtagtggtttgggcattttcgttgggaaaaacgaagaaatggttccggtggcaaaaactcgtgctttgtatgcaccccgacaacccattttcggaatgggtgacatgcggcaacgaaattgcacgaaacctccccaaacatgagttttggacctaaagtagtggattgggcatgttcgttgcgaaaaacgaagaaatggttccggtggcaaaaactcgtgctttgtatgcacccgacacccgttttcggaaagggtgacgtgcgacaacgaaattgcgcgaaaccaccccaaacatgagttttggacctaaagtagtggattgggcatgttcgttgcgaaaaacgaagaaatggttccgctggcaaaaactcgtgctttgtatgcaccccgacacccgttttcggaatgggtgacgtgcgacaacgaaattgcgcgaaaccaccccaaacatgagttttggacctaaagtagtggattgggcatgttcgttgcgaaaaacgacgaaatggttccggtggcaaaaactcgtgctttgtatgcaccccgacaacccgttttcggaatgtgtgacgtgcgataacgaaattgcgcgaaacaaccccaaacatgagttttggacctaaagtagtggtttgggcatgttcgttgcgaaaaacgaagaaatggttccggtggcaaaaactcgtgctttgtatgcaccccgagaaccgttttcggaatgtgtgacgtgcgataacgaaattgcgcgaaacaaccccaaacataagttttggacctaaagtagtggtttgggcatgttcgatgcgaaaaacgaagaaatggttccggtggcaaaaactcgtgctttgtatgcaccccgacaacccgttttcggaatgtgtgacgtgcgacaacgaaattgcgcgaaaccaccccaaacatgagttttggacctaaagtagtggattgggcatgttcgttgcgaaaaacgaagaaatggttccggtggcaaaaactcgtgcttttatgcacctcgatacccgttttcagaatgggtgacgtgcgacaacgaaattgcgcgaaaccacctcaacattagttttggacctaaactagtggattgggcatgttcgttgcgaaaaacgacgaaatggttccgctggcaaaaactcgtgctttgtatgcacccgacacccgttttcggaaagggtgacgtgcgacaacgaaattgcgcgaaaccaccccaaacatgagttttggacctaaagtagtggattgggcatgttcgttgcgaaaaacgaagaaatggttccagtggcaaaaactcgtgcttttatgcacctcgatacctgttttcagaatggttgacgtgcgataacgaaattacgcgaaacaaccccaacattagttttggacctaaagtagtggattgggcatgttcgttgcgaaaaacgaagaaatggttccgctggcaaaaactcgtgctttgtatgcaccccgacactcgttttcggaatgggtgacgtgcgataacgaaattacgcgaaacaaccccaaacatgagttttggacctaaagtagtggattgggcatgttcgttgcgaaaaacgaagaaatggttccggtggcaaaaactcgtgctttgtatgcaccccgacaacccattttcgtaatgtgtgacgtgcgacaacgaaattgcgcgaaaccaccccaaacatgagttttggacctaaagtagtggattgggcatgttcgttgcgaaaaacgaagaaatggttccggtggcaaaaactcgtgctttgtatgcacccgacacccgttttcggaaagggtgacgtgagacaacgaaattgcgcgaaaccaccccaaacatgagttttggacctaaagtagtggattgggcatgttcgttgcgaaaaaccaagaaatggttccggtggcaaaaactcgtgcttttatgcacctcgatacctgttttcagaatgggtgacgtgcgacaacgaaattgcgcgaaaccacctcaaactagagttttggacctaaagtagtggattgggcatgttcgttgcgaaaaacgaagaaatggttccgctggcaaaaactcgtgctttgtatgcaccccgacacccgttttcggaatgggtgacgtgcgacaacgaaattgcgcgaaaccaccccaaacatgagttttggacctaaagtagtggattgggcatgttcgttgcgaaaaacgacgaaatggttccggtggcaaaaactcgtgctttgtatgcaccccgacaacccgttttcggaatgtgtgacgtgcgataacgaaattgcgcgaaacaaccccaaacatgagttttggacctaaagtagtggtttgggcatgttcgttgcgaaaaacgaagaaatggttccggtggcaaaaactcgtgctttgtatgcaccccgagaaccgttttcggaatgtgtgacgtgcgataacgaaattgcgcgaaacaaccccaaacataagttttggacctaaagtagtggattgggcatgttcgttgcgaaaaacgacgaaatggttccggtggcaaaaactcgtgctttgtatgcacccgacacccgttttcggaatgggtgacgtgcgacaatgaaattgcgcgaaaccaccccaaacatgagttttggacctaaagtagtggattgggcctgttcattgcaaaaaacgaagaaatggttccggtggcaaaaactcgtgctttgtatgcaccccgacaacccgttttcggaacgtgtgacgtgcgacaacgaaattgcgcgaaaccaccccaaacatgagttttggacctaaagtagtggattgggcatgttcgttgcgaaaaacaaagaaatggttccggtggcaaaaactcgtgctttgtatgcacccgacacccgttttcggaatgggtgacgtgcgacaacgaaattgcgcgaaaccaccccaaacatgagttttggacctaaagtagtggattgggcatgttcgttgcgaaaaacgaagaaatggttccggtggcaaaaactcgtgctttgtatgcacccgacacccgttttcggaatgggtgacgtgcgacaacgaaattgcgcgaaaccaccccaaacatgagttttggacctaaagtagtggattgggcatgttcgttgcgaaaaacgaagaaatggttccgctggcaaaaactcgtgcttttatgcacctcgatacctgttttcagaatgggtgacgtgcgacaacgaaattgcgcgcaaccacctcaaacttgagttttggatctaaagtagtggattgggcatgttcgttgcgaaaaacgaagaaatggttccgctggcaaaaactcgtgctttgtatgcaccccgacacccgttttcggaatgggtgacgtgcgacaacgaaattgcgcgaaaccaccccaaacatgagttttggatctaaagtagtggattgggcatgttcgttgcgaaaaacgacgaaatggttccggtggcaaaaactcgtgctttgtatgcacccgacacccgtttttggaatgggtgacgtgcgacaatgaaattgcgcgaaaccaccccaaacatgagttttggacctaaagtaatagattgggcatgttcgttgcaaaaaacgaagaaatggttccggtggcaaaaactcgtgctttgtatgcaccccgacaacccgttttcagaatgtgtgacgtgcgacaacgaaattgcgcgaaaccaccccaaacatgagatttggacctaaagtagtggattgggcatgtttgttgcgaaaaacgaagaaatggttccggtggcaaaaactcgtgctttgtatgcacccgacacccgttttcggaatgggtgacgtgcgacaacgaaattgcgcgaaaccaccccaaacatgagttttggacctaaagtagtggactgggcatgttcgttgcgaaaaacgaagaaatggttccgctggcaaaaactcgtgcttttatgcacctcgatacctgttttcagaatggttgacgtgcgataacgaaattacgcgaaacaaccccaaacatgagttttggacctaaagtagtggattgggcatgttcgttgcgaaaaacgaagaaatggttccggtggcaaaaactcgtgctttgtatgcaccccgacaacccgttttcggaatgtgtgacgtgcgataacgaaattgcgcgaaacaaccccaaacataagttttggacctaaagtagtggtttgggcatgttcgatgcgaaaaacgaagaaatggttccggtggcaaaaactcgtgctttgtatgcaccccgacaacccgttttcggaatgggtgacgtgcggcaacgaaattgcacgaaacctacccaaacatgagttttggacctaaagtagtggattgggcatgttcgttgcgaaaaacgaagaaatggttccggtggcaaaaactcgtgcttttatgcacctcgatacccgttttcagaatgggtgacgtgcgacaacgaaattgcgcgaaaccacctcaacattagttttggacctaaactagtggattgggcatgttcgttgcgaaaaacgacgaaatggttccgctggcaaaaactcgtgctttgtatgcacccgacacccgttttcggaatgtgtgacgtgcgacaacgaaattgcgcgaaaccaccccaaacatgagttttggacctaaagtagtggattgggcatgttcgttgcgaaaaacgaagaaatggttccggtggcaaaaactcgtgcttttatgcacctcgatacctgttttctgaatggttgacgtgcgacaacgaaattgcgcgaaaccacctcaaacatgagttttggacctaaagtagtggattgggcatgttcgttacgaaaaacgaagaaatggttccgctggcaaaaactcgtgctttgtatgcaccccgacacccgttttcggaatgtgtgacgtgcgacaacgaaattgcgcgaaaccacccccaaacatgagttttggacctaaagtagtggattgggcatgttcgttgcgaaaaacaaagaaatggttccggtggcaaaaactcgtgctttgtatgcacccgacaaccgttttctgaaagggtgacgtgagacaacgaaattgcgcgaaaccaccccaaacatgagttttggacctaaagtagtggattgggcatgttccttgccaaaaacgaagaaatggttccggtggcaaaaactcctgcttttatgcacctcgacacctgttttcagaataggtgacgtgcgacaacgaaattgcgcgaaacaaccccaaacatgagttttggacctaaagtagtggattgggcatgttcgttgcgaaaaacgaagcaatggttccggtggcaaaaactcgtgctttgtatgcaccccgatatcccgttttcgtaatgtgtgacgtgcgacaacgaaattgagcgaaaccaccccaaacatgagttttggacctaaagtagtggattgggcatgttcgttgcgaaaaacgaagaaatggttccggtggcaaaaactcgtgctttgtatgcacccgacacccgttttcggaaagcgtgacgtgcgacaacgaaattgcacgaaaccaccccaaacatgagttttggacctaaagtagtggattgggcatgttcgttgcgaaaaacgaagaaatggttccggtggcaaaaactcgtgctttgtatgcacccgacacccgttttcggaaagggtgacgtgcgacaacgaaattgcgcgaaaccaccccaaacatgagtttgggacctaaagtagtggattgggcatgttcgttgcgaaaaacgaagaaatggttccggtggcaaaaactcgtgcttttatgcacctcgatacctgttttctgaatggttgacgtgcgacaacgaaattgcgcgaaaccacctcaaacatgagttttggacctaaagtagtggattgggcatgttcgttacgaaaaacgaagaaatggttccgctggcaaaaactcgtgctttgtatgcaccccgacacccgttttcggaatgggtgacgtgcgacaacgaaattgcgcgaaaccaccccaaacatgagttttggacctaaagtagtggattgggcatgttcgttgcgaaaaacgaagaaatggttccggtggcaaaaactcgtgctttgtatgcaccccaacacccgttttcggaatgggggacgtgcgacaacaaaattgcgcgaaacccccccaaacaggatttttggacctaaagtaatggattgggcatgttctttgcaaaaaaaaaaaaaatggttccgggggcaaaaactcgtgcttttatgccccccgatacccgttttcagaatgggtgacgtgcgacatcaaaattgcgcgaaacctccccaaacatgagctttggacctaaagtagtggattaggcatgttcgttgtgaaaaacgaagaaatggttccggtggaaaaaaactcgtgctttgtatgcaccccgacacccgttttcagaatgggtgacgtgcggcaacgaaattgcgagttttggacctaaagtagtggattgggcatgttcattgcgaaaaacgaagaaatggttccggtggcaaaaactcgtgcttttatgcacctcgatacctgttttctgaatggttgacgtgcgacaacgaaattgcgcgaaaccacctcaaacatgagttttggacctaaagtagtggattgggcatgttcgttacgaaaaacgaagaaatggttccgctggcaaaaactcgtgctttgtatgcaccccgacacccgttttcggaatgggtgacgtgcgacaacgaaattgcgcgaaaccaccccaaacatgagttttggacctaaagtagtggattgggcatgttcgttgcgaaaaacgaagaaatggttccggtggcaaaaactcgtgctttgtatgcaccccgacaacccgttttcgtaatgtgtgacgtgcgacaacgaaattgcgcgaaaccaccccaaacatgagttttggacctaaagtagtggattgggcatgttcgttgcgaaaaacgaagaaatggttccggtggcaaaaactcgtgcttttatgcacctcgatacctgttttcagaatgggtgacgtgcgacaacgaaattgcgcgaaaccacctcaaactagagttttggacctaaagtagtggattgggcatgttcgttgcgaaaaacgaagaaatggttccgctggcaaaaactcgtgctttgtatgcaccccgacacccgttttcggaatgggtgacgtgcgacaacgaaattgcgcgaaaccaccccaaacatgagttttggacctaaagtagtggattgggcatgttcgttgcgaaaaacgaagaaatggttccggtggcaaaaactcgtgctttgtatgcaccccgacaaccgttttcggaatgtgtgacgtgcgataacgaaattgcgcgaaacaaccccaaacataagttttggacctaaagtagtggtttgggcatgttcgttgcgaaaaacgaagaaatggttccggtggcaaaaactcgtgctttgtatgcacccgacacccgttttcggaaagggtgacgtgcgacaacgaaattgcgcgaaaccaccccaaacatgagttttggacctaaagtagtggattgggcatgttcgttgcgaaaaacgaagaaatggttccggtggcaaaaactcgtgcttttatgcacctcgatacctgttttcagaatgggtgacgtgcgacaacgaaattgcgcgaaaccacctcaaactagagttttggacctaaagtagtggattgggcatgttcgttgcgaaaaacgaagaaatggttccgctggcaaaaactcgtgctttgtatgcaccccgacacccgttttcggaatgggtgacgtgcgacaacgaaattgcgcgaaaccaccccaaacatgagttttggacctaaagtagtggattgggcatgttcgttgcgaaaaacgaagaaatggttccggtggcaaaaactcgtgctttgtatgcaccccgacaaccgttttcggaatgtgtgacgtgcgataacgaaattgcgcgaaacaaccccaaacataagttttggacctaaagtagtggtttgggcatgttcgttgcgaaaaacgaagaaatggttccggtggcaaaaactcatgctttgtatgcaccccgacaacccgttttcggaatgtgtgacgtgcgacaacgaaattgcgcgaaaccaccccaaacatgagttttggacctaaagtagtggattgggcatgttcgttgcgaaaaacaaagaaatggttccggtggcaaaaactcgtgctttgtatgcacccgacacccgttttcggaaagggtgacgtgcgacaacgaaattgcgcgaaaccacctcaaacatgagttttggacctaaagtagtggattgggcatgttcgatgcgaaaaacgaagaaatggttccggtggcaaaaactcgtgctttgtatgcaccccgacaacccgttttcggaatgtgtgacgtgcgacaacgaaattgcgcgaaaccaccccaaacatgagttttggacctaaagtagtggattgggcatgttcgttgcgaaaaacgaagaaatggttccgctggcaaaaactcgtgcttttatgcacctcgatacctgttttcagaatggttgacgtgcgataacgaaattacgcgaaacaaccccaaacatgagttttggacctaaagtagtggattgggcatgttcgttgcgaaaaacgaagaaatggttccggtggcgtgctttgtatgcaccccgacaacccgttttcgtaatgtgtgacgtgcgacaacgaaattgcgcgaaaccaccccaaacatgagttttggacctaaagtagtggattgggcatgttcgttgcgaaaaacgaagaaatggttccggtggcaaaaactcgtgcttttatgcacctcgatacctgttttcagaatgggtgacgtgcgacaacgaaattgcgcgaaaccacctcaaactagagttttggacctaaagtagtggattgggcatgttcgttgcgaaaaacgaagaaatggttccgctggcaaaaactcgtgctttgtatgcaccccgacacccgttttcggaatgggtgacgtgcgacaacgaaattgcgcgaaaccaccccaaacatgagttttggacccaaagtagtggattgggcatgttcgttgcgaaaaacgacgaaatggttccggtggcaaaaactcgtgctttgtatgcaccccgacaacccgttttcggaatgtgtgacgtgcgataacgaaattgcgcgaaacaaccccaaacatgagttttggacctaaagtagtggtttgggcatgttcgttgcgaaaaacgaagaaatggttccggtggcaaaaactcgtgctttgtatgcaccccgagaaccgttttcggaatgtgtgacgtgcgataacgaaattgcgcgaaacaaccccaaacataagttttggacctaaagtagtggtttgggcatgttcgatgcgaaaaacgaagaaatggttccggtggcaaaaactcgtgctttgtatgcaccccgacaacccgttttcggaatgtgtgacgtgcgacaacgaaattgcgcgaaaccaccccaaacatgagttttggacctaaagtagtggattgggcatgttcgttgcgaaaaacgaagaaatggttccgctggcaaaaactcgtgcttttatgcacctcgatacctgttttcagaatggttgacgtgcgataacgaaattacgcgaaacaaccccaaacatgagctttggacctaaagtagtggattgggcatgttcgttgcgaaaaacgaagaaatggttccggtggcaaaaactcgtgctttgtatgcaccccgacaacccgttttcgtaatgtgtgacgtgcgacaacgaaattgcgcgaaaccaccccaaacatgagttttggacctaaagtagtggattgggcatgttcgttgcgaaaaacgaagaaatggttccggtggcaaaaactcgtgcttttatgcacctcgatacctgttttcagaatgggtgacgtgcgacaacgaaattgcgcgaaaccacctcaaactagagttttggacctaaagtagtggattgggcatgttcgttgcgaaaaacgaagaaatggttccgctggcaaaaactcgtgctttgtatgcaccccgacacccgttttcggaatgggtgacgtgcgacaacgaaattgcgcgaaaccaccccaaacatgagttttggacctaaagtagtggattgggcatgttcgttgcgaaaaacgacgaaatggttccggtggcaaaaactcgtgctttgtatgcaccccgacaacccattttcggaatgtgtgacgtgcgataacgaaattgcgcgaaacaaccccaaacatgagttttggacctaaagtagtggtttgggcatgttcgttgcgaaaaacgaagaaatggttccggtggcaaaaactcgtgctttgtatgcaccccgagaaccgttttcggaatgtgtgacgtgcgataacgaaattgcgcgaaacaaccccaaacataagttttggacctaaagtagtggtttgggcatgttcgatgcgaaaaacgaagaaatggttccggtggcaaaaactcgtgctttgtatgcaccccgacaacccgttttcggaatgtgcgacgtgcgacaacgaaattgcgcgaaaccaccccaaacatgagttttggacctaaagtagtggattgggcatgttcgttgcgaaaaacgaagaaatggttccggtggcaaaaactcgtgcttttatgcacctcgatacccgttttcagaatgggtgacgtgcgacaacgaaattgcgcgaaaccacctcaacattagttttggacctaaactagtggattgggcatgttcgttgcgaaaaacgacgaaatggttccgctggcaaaaactcgtgctttgtatgcacccgacacccgttttcggaatgtgtgacgtgcgacaacgaaattgcgcgaaaccaccccaaacatgagttttggacctaaactagtggattgggcatgttcgttgcgaaaaacgacgaaatggttccgctggcaaaaactcgtgctttgtatgcacccgacacccgttttcggaatgtgtgacgtgcgacaacgaaattgcgcgaaaccaccccaaacatgagttttggacctaaagtagtggattgggcatgttcgttgcgaaaaacgaagaaatggttccggtggcaaaaactcgtgctttgtatgcaccccgacaaccgttttcggaatgtgtgacgtgcgataacgaaattgcgcgaaacaaccccaaacataagttttggacctaaagtagtggtttgggcatgttcgatgcgaaaaacgaagcaatggttccggtggcaaaaactcgtgctttgtatgcaccccgacaacccgttttcggaatgtgtgacgtgcgacaacgaaattgcacgaaaccaccccaaacatgagttttggacctaaagtagtggattgggcatgttcgttgcgaaaaacgaagaaatggttccggtggcaaaaactcgtgcttttatgcacctcgatacccgttttcagaatgggtgacgtgcgacaacgaaattgcgcgaaaccacctcaacattagttttggacctaaactagtggattgggcatgttcgttgcgaaaaacgacgaaatggttccgctggcaaaaactcgtgctttgtatgcacccgacacccgttttcggaatgtgtgacgtgcgacaacgaaattgcgcgaaaccaccccaaacatgagttttggacctaaaccagtggattgggcatgttcgttgcgaaaaacgacgaaatggttccgctggcaaaaactcgtgctttgtatgcacccgacacccgttttcggaatgtgtgacgtgcgacaacgaaattgcgcgaaaccaccccaaacatgagttttggacctaaagtagtggattgggcatgttcgttgcgaaaaacgaagaaatggttccggtggcaaaaactcgtgctttgtatgcaccccgacaaccgttttcggaatgtgtgacgtgcgataacgaaattgcgcgaaacaaccccaaacataagttttggacctaaagtagtggtttgggcatgttcgttgcgaaaaacgaagaaatggttccggtggcaaaaactcgtgctttgtatgcaccccgacaacccgttttcggaatgtgtgacgtgcgacaacgaaattgcgcgaaaccaccccaaacatgagttttggacctaaagtagtggattgggcatgttcgttgcgaaaaacgaagaaatggttccggtggcaaaaactcgtgctttgtatgcccccgacacccgttttcggaaagggtgacgtgcgacaacgaaattgcgcgaaaccaccccaaacatgagttttggacctaaagtagtggattgggcatgttcgttgcgaaaaacgaagaaatggttccggtggcaaaaacttgtgctttgtatgcaccccgacacccgttttcgaaatgggtgacgtgcgacaacgaaattgcgcgaaaccaccccaaacatgagttttggacctaaagtagtggattgggcatgttcgttgcgaaaaacgaagaaatggttccagtggcaaaaactcgtgcttttatgcacctcgatacctgttttcagaatggttgacgtgcgataacgaaattacgcgaaacaaccccaaacatgagttttggacctaaagtagtggattgggcatgttcgttgcgaaaaacgaagaaatggttccggtggcaaaaactcgtgctttgtatgcaccccgacaacccgttttcgtaatgtgtgacgtgcgacaacgaaattgcgcgaaaccaccccaaacatgagttttggacctaaagtagtggattgggcatgttcgttgcgaaaaacgaagaaatggttccggtggcaaaaactcgtgcttttatgcacctcgatacctgttttcagaatgggtgacgtgcgacaacgaaattgcgcgaaaccacctcaaactagagttttggacctaaagtagtggattgggcatgttcgttgcgaaaaacgaagaaatggttccgctggcaaaaactcgtgctttgtatgcaccccgacacccgttttcggaatgggtgacgtgcgacaacgaaattgcgcgaaaccaccccaaacatgagttttggacccaaagtagtggattgggcatgttcgttgcgaaaaacgacgaaatggttccggtggcaaaaactcgtgctttgtatgcaccccgacaacccgttttcggaatgtgtgacgtgcgataacgaaat

SEQ ID NO: 604 - DNA, 818 bp, Zea mays
  source (0)...(0): Zea mays BAC clone full insert sequence contig bacm.pk108.h15-2.fis1
  misc_feature (1)...(818): n = A,T,C or G
tcagggtagccnnnnnnnnnnnnnnnnnnnnnnnnnnnnnnnnnnnnnnnnnnnnnnnnnnnnnnnnnnnnnnnnnnnnnnnnnnnnnnnnnnnnnnnnnnggtcttagcccgagtccgagccctggggtcgggcggagcggagttcgtcgtcttccgggtcttagcccgagtccgagccctggggtcgggcggagcggagttcgccgtcttccgggtcttagcccgagtccgagccctggggtcaggcggagcggagtttcccatggcgccttcggcagggcctgactgcctgtcagactcactctgtcgagtggcactgtagtcggtgtggcacagccggcgctgtccttctgtcagcggctctgctgggggccgcgtgtcaggataaaggtgtcaggcaaccttggcgttaaatgctcctgcaacctggtcagtcggcgcggcgatttagtcagggttgcttctaggcgaagcccaaggcctcgggcgagccggaggtgcgtccgccgtttaaaaggggggcctcgggcgagacggaagtctctcgaggtcggctgcccttggccgaggctaggcacgagcgaagcgtgatcaagtcactcgtgtggactgatccctgacttaatcgtacccatcaggcctttgcagctttatgctgatgggggttaccagctgagattagcgtcttgagggtacccctaattatggtccccgacagatttcaggttgatcggtgagtttatcgagcgttttttcctacagtccacaaaaccacataaaattcaggttagatcttatcccagcacttttgagctt

SEQ ID NO: 605 - DNA, 848 bp, Zea mays
  source (0)...(0): Zea mays BAC clone full insert sequence contig bacm.pk108.h15-2.fis2
  misc_feature (1)...(848): n = A,T,C or G
gtgcaacgcgcagtagnnnnnnnnnnnnnnnnnnnnnnnnnnnnnnnnnnnnnnnnnnnnnnnnnnnnnnnnnnnnnnnnnnnnnnnnnnnnnnnnnnnnngaatagacgaccagcccaactgcggcccatagtggacgacctagggttggccgcccctaggggctgtgccccctctctctatttatataggagttgcgcctcctttgttttttcgagttttgttttacatctagctttagctaccccagaactccacctcgagtgatattaagattgctcgcatctttttcttgttcgttcttcgattgcgcacaggaaaggatcttcgtgatcaggccgatctcgcatcagcaaggtcggtaaccattggaagttggttcagcgattgcattggcgcttcgggatcgctcgtcgtagtcggatcgtgagggtctacttccaccaaatcggaattatctccactcaccgaaagatcgggcactccagttctatcacattgccgcacgtcacccattccgaaaacgggtgtcgaagtgcatacaataacgaatttttgccaccggaaccatttcttcgtttttcgcaacgaacatgcccaatccactactttaggtccaaaacacatgtttgggagtggtttcacgcaatttcattgccgcacgtcacccattccgaaaacgggtgtcggggtgcatacaagcacgagtttttgccaccggaaccatttcttcttttttcgcaacgaacatgcccaatccactactgtaggtccaaaactcatgtttggggtggtttcgcgcaatttcgttgccgcacgtcactcgtctgaacacgggtgacagacta

SEQ ID NO: 606 - DNA, 822 bp, Zea mays
  source (0)...(0): Zea mays BAC clone full insert sequence contig bacm.pk108.h15-2.fis3
  misc_feature (1)...(822): n = A,T,C or G
cagtccggcatannnnnnnnnnnnnnnnnnnnnnnnnnnnnnnnnnnnnnnnnnnnnnnnnnnnnnnnnnnnnnnnnnnnnnnnnnnnnnnnnnnnnncgtgcggaggggtacggccaaggctcctgggcgttttatagtcgcggacgtggaccagggcactggcttggcttgggcgcggcgcgggcgccgcgcgcgggcgtgctctggcgcggcagacggcgtcgaacacgtggcggtttgtttcttccagtgttcaaatgtcgccagaggtcgcaaacgtgcgaatcttttgcaaaagtccggcgcagacctcttcctggcaccacggcctagggagggagatcttcgggtgccaaaacaggtgtgtcatactgagcatatcacgacaaaagccatgccatggcatgtcaaacgtccgagtctcgagctcaactttttccagtgggtgccctaagtggtattgcacatttttggtatagaacccaagtggttttggcgccatttttaaagtgaacacggttgatctttgatttagggctaaaatgggacttagagggaattagagagctctagctctctctccacttggagatttgaaatggggtttccctaggggcctttttgtaatatttccctcccctaattgatggttataatgttgcttagggtttgggtaaaaattacccatgttttgcacatttgctcactctctttcccctcttatccatggttttgggagatagggtttaagagaggcctagggttctttccctctctcccaaggtgatagttgcacacaattagggtaatgcctttggtc

SEQ ID NO: 607 - DNA, 867 bp, Zea mays
  source (0)...(0): Zea mays BAC clone full insert sequence contig bacm.pk108.h15-2.fis4
  misc_feature (1)...(867): n = A,T,C or G
tagcatgcgcattatnnnnnnnnnnnnnnnnnnnnnnnnnnnnnnnnnnnnnnnnnnnnnnnnnnnnnnnnnnnnnnnnnnnnnnnnnnnnnnnnnnnnnnnncctctctattctattcaggagctacgcctcctttattttgggagttttgttttacgttagccttagctactctcgaacacgcgcacatctgcgctgtcttcgtgtattcagaactccaccctcgagtaatagattagattgctcgcatctttttcttgttcgttcttcgattgcgcacaggaaacgatcttcgtgatcaggccgatctcgcatcagcaaggtcggtaaccacagggagttggttcagcgattgcattggcgcctcgggcttgctcgtcgtagtcggatcgcaagggtcatcttccgccaaatcggaattatctctactcgccgaaagatcgggcacctcagctacatcagggcccgtgcaagagaattgaactacatcatgctgttaaagaacgaaggcccggaagaatagacgaccagcccaactgcggcccataatggacgacctagggttggccgcccctaggggctgcgccccctctctatttatccaggagctgcgcctcctttatttttggtgttttgttttagatctagctttagctaccccagaacacgcacaaatacgtgctgtcctctgtgattcagaactccacctcgagtgatattaagattgctcgcatctttttcttgttcgttcttcgattgcgcacaggaaacgatcttcgtgatcagcctgatctcgcaggagcaaggtcgggtaaccattggaagttgggtcagcaattgcattggcccttcggattcgctcgtca

SEQ ID NO: 608 - DNA, 764 bp, Zea mays
  source (0)...(0): Zea mays BAC clone full insert sequence contig bacm.pk108.h15-2.fis5
tcttagatcacagcgtgggcgactgactgcacatgtcccgcttgggattcatctcatggcttccggaacacaagaacgaccggctagctgaaacacaggctggttagcggaccaggaacccatccggtggtgaaatttgccccagggtttcccattaatacaatggccgaagccatcttaaaattcagcatcgtcaacatattgatcctttacagtgtgcaaaccaaagaagacaaagcatcagcaataacattgtccttcccgttcttgtgtttaataatgtaaggaaaagactcaatgaattcgacccatttagcatgacgacggttcagatttgtttgggtacgaatatgttttaaagcctcatgatcagaatgaattatgaactcacgatgccaaagatagtgctgccatgtatgtaaagtgcgcactaacgcgtaaagctccttatcataagtagaatatttcagactagcaccgcttaatttttcactaaaataagcaactggttttccttcttgtaataaaacagcacctagcccaataccgctagcatcgcattcaagctcaaatactgtattaaaatcaggcaattgcaataggggagcttgggttaacttatctttcaaagtgctgaacgcttcctcctgcgaatcactccaagcaaatggcacatctttctttgtaagctcatgtagaggcgctgcaatggagctaaaatcacgaacaaatctgcggtagaaaccggcaagtccaagaaagct

SEQ ID NO: 609 - DNA, 754 bp, Zea mays
  source (0)...(0): Zea mays BAC clone full insert sequence bacm.pk108.h15-2.fis6
  misc_feature (1)...(754): n = A,T,C or G
tcaaggtggcattnnnnnnnnnnnnnnnnnnnnnnnnnnnnnnnnnnnnnnnnnnnnnnnnnnnnnnnnnnnnnnnnnnnnnnnnnnnnnnnnnnnnnnntgaatacacgaagacagcgcagatttgcgcgcgttcgagagtagctaaggctaacgtaaaacaaaactcgagaataaaggaggcgcagctcctggataaatagagggggcgcagcccctaggggcggccaaccctaggtcgtccactatggcattcttcagtagcatgacgaagttaagatctctggcggcgcttgatgtggaggtgctgctggtgtagtcgtactcatagtgatgtgctcatcatcctccctttcttgaagtgaagtcgtcctcgacgacaactcctcatcctcggccatatatggtttcaaatctgcaacattaaaactagtgggaaacaccaaattctgcaggcaggtcaaggatataagcattatcattaatctttgttagcaccttaaaaggaccagcagcacgaggcattaatttagaacggcgcaaagtaggaaaccgatcctttctcaagtgcaaccaaaccatatcacctggctcaaaagtaacatgttttcttcctttactaccagcaacctgattttttgcattagtagcagcaatgttctgtttcgtttgttcatgtatggtaatcatttgttcaacatgtgcagcagcatctacatgtgggggcgtttgcagcattaagcgaaatcaaatc

SEQ ID NO: 610 - DNA, 813 bp, Zea mays
  source (0)...(0): Zea mays BAC clone full insert sequence contig bacm.pk108.h15-2.fis7
  misc_feature (1)...(813): n = A,T,C or G
aagccnnnnnnnnnnnnnnnnnnnnnnnnnnnnnnnnnnnnnnnnnnnnnnnnnnnnnnnnnnnnnnnnnnnnnnnnnnnnnnnnnnnnnnnnnnnnnnnnnnnnnttttgagcctcgcactttctttcaataatctgcattgttgaatttgtgtgctttcgcgtcatttattgctggttgcattgtgttcttccaccattcaaaccctagcgccgccaccatctcccgtttgatcacgccacaaaccgagtcaacatcgtttccttgtttttctccttcggttacgtaaaaaaaacagaaaaaacaaaccgagtcaacggacgtttccttatttttctccttcggttacgaaaaaaaacagaaaaaaaaacaaaccgagtcaatagccgcctccttgtttttctccttcggttacataaaaaaaacagaaaaaaagaaaacgaaggagaaaggatactgttgtctcatcccggtcgttttaaaacataacttgaggtaccttccttaaaccgggcataacttttcgctcgggtgtccaaaaaatctgaaatttttacaggaggttgttgacaccattctaaggccggccaaactcaccttcggtctgtttggtttcgacaaaattgtcaaaaagttcgggaaaataaagaaaaaaattcgtcaaagttctcgcacgcttttcagagaacttcctgattttctatagaccacatctgatctctgttttaagtgaaaactcgtgtactctattttgttgctccntgtgctgagaaaaatatcnaaaaatctacaaaaagaaaacaaaatcactt

SEQ ID NO: 611 - DNA, 881 bp, Zea mays
  source (0)...(0): Zea mays BAC clone full insert sequence contig bacm.pk108.h15-2.fis8
  misc_feature (1)...(881): n = A,T,C or G
gacgannnnnnnnnnnnnnnnnnnnnnnnnnnnnnnnnnnnnnnnnnnnnnnnnnnnnnnnnnnnnnncgttaaccctacaacataaccaagaaacgagacatgtcgtgtgcaattgatgcattttttcatgttagcaaataactgggcagcacgcaatgcataaaaaacagcacttaaatgttccaaatgctctttcttagatttgctgtaaataaggatatcatcgaaataaacaaccacaaagaatcctatgaagggccgcagaacttcattcatcactcgcataaaagtgctgggagcattagtcaatccaaatggcataaccaaccattcatataaaccaaatttcgttttaaaagctgttttccattcatcacccagtttcattctaatctggtggtaaccactacgcaaatcaatcttagtgaaaataatggcaccactaagctcatctagcatatcatcaaggcgtggtataggatagcgataacgtatagtgatgttattaatagcacgacagtctacacacatacgccatgacccatctttcttgggaacaagtaacacaggaacagagcaagggctaagagactcacgaatgtatcctttgtcaagcaacgcctgtacctggcgctgaatctccttcgtctcatccggatttgtacggtatggtgcgcggttcggaagctgtgcgccgggaatgaggtcgatctggtgctcaatgccacgaagcggtggtagacccgatggtaagtctttgggaaagacatcagcgtactcctgcaaaaggttagcaaccatagggggaatagccaaagatggtgcatcatcaagtgaaatgaggacactagagcatacaagtgcatagcatggcaaatg

SEQ ID NO: 612 - DNA, 745 bp, Zea mays
  source (0)...(0): Zea mays BAC clone full insert sequence contig bacm.pk108.h15-2.fis9
tctcgattgcgcacaggaaacgatcttcgtgatcaggccgatctcgcatcagcaaggtcggtaaccacagggagttggttcagcgattgcattggcgcctcgggcttgctcgtcgtagtcggatcgcaagggtcatcttccgccaaatcggaattatctctactcgccgaaagatcgggcacttcagcttcatcatctactcgccaaaagatcgggcacctcagctacatcaattggtatcagattttcaggttgatcggtgagtttatcgagcgtttttttcctaaagtccacaaaaccacataaaaattcaggttagatcttatcccagcacccttttgagcctcgcactttctttcaataatctgcattgttgaatttgtgtgctttcgcgtttccttgttgctggttgcattgtgttcttccaccattctaaccctaacgccgccaccatctcccgtttgatcacgccacaaaccgagtcaacatcgtctccttgtttttctccttcggttacgtcaaaaaaaaacagaaaaaacaaaccgagtcaacggctgtttccttgtttttctccttcagttacgaaaaaaaaacagaaaaaaaacaaaccgagtcaacaaccgcttccttgtttttctccttcggttactcaaaaaaaaaacagaaacaaaaaaaaaaagaaaaacgaaggagaaaaggatacggttgtttcatcccggtcgtttttaaaacataacttgaggtt

SEQ ID NO: 613 - DNA, 672 bp, Zea mays
  source (0)...(0): Zea mays BAC clone full insert sequence contig bacm.pk108.h15-2.fis10
agctatcagtatcatatgccaaggtcgaccaagtaacaaagagcatgcttccatgggaataacatcacaatcaacaaaatcagaataagcacccatggagaaaggaacgcgtacggaacgtgtgatttttattttaccaccatcattaagccattgaatgtgatatgggtttggatgcttacgagtgggtaacgataacttttcgaccagcatggtactcgccaaattgttgcaactgccgctgtcgataatgatgcgaattgaccgctcctgcacaacaccctttgtatggaacagagtgtgtcgctgattcttctcgggcaaagcgacctgtgtactgagaacacgctgcacaacaagacttttatacatatcagcgtcgcccgggttgacatgtacctctgccttagctgcatggtcagtggcaagtagtgcatgttcaatttcttcagaatcactagcggaagagtactcaccatcgtcacgaatgagcaaagtgcgcttgtttgggcagtcccgaatcacatggccaaatcctctacaacgataacactgaatatcccgtgtacgaccagtgggtggggcagtgctggctggtttggtcgtcttctcgcgtggagtagtggtggacgtggatggcgcagggggaactggtgctgaggtggatgtcga

SEQ ID NO: 614 - DNA, 792 bp, Zea mays
  source (0)...(0): Zea mays BAC clone full insert sequence contig bacm.pk108.h15-2.fis11
gggagagtgcagggacgacgtgctagtgcaaggtctaatgtttctgcaggaaaatctacaccatggcaacagcgcacgactacgtccatgaccggccgtacaccagcaccaactccctcgccaagtcgaccagcacccccgccttcctccggcgacaaaccacgtgcatcttccacaaattcagcaaccaaatctgcccagaaaccagcaggtagtgcctcttcagtagcctccacgggtagaacaagagatgttctgtgttatcgatgcaagggctatggacacgtgcagcgtgattgtcctaatcagcgtgttttggtggtaaaagacgatggtgggtattcctctgctagtgatttggatgaagctacacttgctttgcttgcggctgatgatgcaggcactaaggaaccacccgaagaacagattggtgcagatgatgcagagcattatgagagcctcattgtacagcgtgtgcttagtgcacaaatggagaaggcagagcagaatcagcgacatacgttgtttcaaacaaagtgtgtcattaaggagcgttcatgtcgtttgatcattgatggaggtagctgcaacaacttggctagcagcgacatggtggagaagcttgcacttacgaccaaaccgcacccgcatccatatcacattcaatggcttaacaatagtggtaaggtcaaggtaaccaagctggtacgaattaattttgctattggtcccttcagtgagtcatgttgttgactagatgaaagcccagggagtcacgagttaagagaagtc

SEQ ID NO: 615 - DNA, 1383 bp, Zea mays
  source (0)...(0): Zea mays BAC clone full insert sequence contig bacm.pk108.h15-2.fis12
tagaatagcaacattcaatgacaagtggggtctttcaactttcaacgcatcaagcgtataaatacggccataccgcaaacttattttgcacgctttctggccaaccactcttgctcactcattttttagctcttgtgcactgtgatctgctaagcttttagctttgaagcttcggctttgaaaacagttttttagtgtttccgaagatgtctgaagctgctaagaaggctgctgctgaaatgaagctgagtcttgatgaagagaagaacttagggtttcttatagcaatgtcgaagaccaacacagaaaagatcaccagggaaattctggaagggctgtctgaagatactggtgacagtgaaagttatgatgtggacagcggtggcgaagactccgaagatcgcccctggcgaccaagccattcagtttatggtaaatcaactatcaaagagaatcatcttgttaatatgagaggaaggtatttccgggatctgtccattgtgagggcggacgaaggggaaaagacttgtccacaccctgaagagaatgaagttgtggtgtaccgaagctttttgaaagccggattgcgattccccttgagcagcttcgtcgtggaggtgttgaaaatcttcgaagtctatcttcatcaacttactccagaggctattataaggctaaatatcttcgtgtgggccacgagaagccaaggtctgaagcctgacgcaagaagcttctgtaatatacatgaattattatatgaaacaaagccttggggcaaagaacagtaccacaataactttggctgctacagtttcgtctctcgttccgaggcaagctgtcccgtaccaacctttcggaagagatggcccggggattggatgacagaatggttttatgtgaagaatgacctatcagcacgagaagacatcaaaggtataattatgcgtcctatttggcaaagcttcggccttcggaggccgaaggtggaaatgaatgaagctgccgaagaatgccagagggccttcggcgtcatctgctcttttattggaacaagagatttagtacaagaacatattgccttccgggtgtggccgcttgcggagaaatgggaaatgcctcaagaaaccacaaaagagaccgacgaaggtgggcttgtgagactgaagcacaccttcaagtttggagataaatttactgagccagatgacgactggctaaagagtattgaaaatttaagtgacgaattacttggtgcttattcgaaggccgaagataccgcgatgtcagcagccttcggaggccgaaaaaagaagaggctgaatcgggtatttgatgcaattgggtttgtttaccctgactattgctaccccatccgtagatttt

SEQ ID NO: 616 - DNA, 876 bp, Zea mays
  source (0)...(0): Zea mays BAC clone full insert sequence contig bacm.pk108.h15-2.fis13
ttaccttgatgaatttttttgacaattttgtcgaaacccaaacagaccgtaggtgagtttggccggcctcagaatggtgtcaactagctcctgtaaaaatttcagattttttggacacccgagcgaaaagttatgcccggtttatggaaggttcctcaagttatgttttaaaaacgaccgggatgaaacaaacgtatcctttctccttcgttttttttgtttctgtttttttttttatgtaactgaaggagaaaaacaaggaagcggtcgttgactcggtttgttttttttctgttttttttcgtaaccgaaggagaaaatcaaggaaacggccgttgactcggtttgttttttctgttttttttttgacgtaaccgaaggagaaaaacaaggaaacaatgttgactcggtttgtggcatgatcaaacgggagatggtggcggcgctagggtttgaatggtggaagaacacaatgcaaccagcaacaaatgacgcgaaagcacacaaattcaacaatgcagattattgaaagaaagtgcgaggctcaaaagggtgctgggataagatctaacctgaatttttatgcggttttgtggactgtaggaaaaaaaacgctcgataaactcaccgatcaacctggaaaccctttttggcatcactagtacaatatttacggtactgccattctgctagttccatccgtcctttgcacttgtggccagcaatatagtttcgtgttttgcactataattcaactttgcattattgtttggtcgtgctaatccttgacttgagtgcagcctacccagaactccacatatttctacgacgagtaggtttctgtttctccaggcaatcgctcatccaatctttcac

SEQ ID NO: 617 - DNA, 731 bp, Zea mays
  source (0)...(0): Zea mays BAC clone full insert sequence contig bacm.pk108.h15-2.fis14
gtttcctcagaatcactggctgaagaatactcaccattgtcacgtataagcaaggtacgcttgtttgggcagtcccgaatcatgtgcccaaaccctctgcaacgatggcactgaatatcccgtgtacgtcctgtggaagaagcggcgcctttggcagggggcgccactggcttggtcgtccctgtgcgcgatgtagtgctaggcgtagaaggtgcagggctggaaggagttgagctgtgtgttggaccccgccctgcaagagagttagtatatgtctttgatcgtcgtccctgcacttcacgttcagctttgcaagcatattcaaacaaagtggttatatcaaaataatccttataatcaagtatatcctgaatttccctgtgcaaaccaccacgaaaacgcgccatagcagcgtcatccgactcaactaaaccacaacgaagcatacccttttgtaactcctggtaatattcctcaacagactgtgaaccttgttgaaaacgctgcattttgttaagcaaatcacgagcataataggaaggaacaaatctgtggcgcatggcagcttttaattgggtccaagtaatgacactgttaatgggaagtttttgtttatactcatgccaccaaattaaagcaaaatcagtaaattcactaatggcagccttcacttggctattagcagcaatatcatggcatgaaaatttctgttctacctctaattcccaatc

SEQ ID NO: 618 - DNA, 1678 bp, Zea mays
  source (0)...(0): Zea mays BAC clone full insert sequence contig bacm.pk108.h15-2.fis15
tcagcgccaggtacaggcgttgcttgacaagggatacattcgtgagtctcttagcccttgctctgttcctgtgttacttgttcccaagaaagatgggtcatggcgtatgtgtgtagactgtcgtgctattaataacatcactattcgatatcgatatcctataccacgccttgatgatatgctagatgagcttagtggtgccattattttcactaagattgatttgcatagtggttaccaccagattagaatgaaactgggtgatgaatggaaaacagcttttaaaatgaaatttggtttatatgaatggttggttatgccgtttggattgactaatgttgccagcacttttatgcgagtgatgaatgaagttctgaggcccttcataggattgtttgtggttgtttattttgatgatatccttatttacagcaaatctaagaaagagcatttggaacatttaagtgttgtttttgatgcattgcatgctgcccagttatttgctaacatggaaaaatgcatcttttgcacacaacgtgtctcgtttcttggttatgttgttactccacagggcattgaggtggatagcagcaagattgctgccattcgggagtggcctacaccgacgacggtcacacaaattcggagctttcttggacttgccggtttctaccgtagatttgttcgtgattttagctccattgcagcgcctctacatgagcttacaaagaaagatgtgtcgtttgcttggagtgattcgcaggaagtagcgttcagcactttgaaagataagttaacccaagctcccctattgcaattgcctgattttaataaagtgtttgagcttgaatgcgatgctagcggtattgggctaggtgctgttttgttacaagaaggaaaaccagttgcttattttagtgaaaaattaagcggtgctagtctaaaatattctacttatgataaggagctttacgctttagtgtgcactttgcatacatggcagcactatctttggcatcgtgagttcataatccattctgatcatgaggctttaaaacatattcgtacccaaacaaatctgaaccgtcgtcatgctaaatgggtagaattcattgagtcctttccttacattattaaacacaagaacaggaaggacaatgttattgctgatgctttgtctcgtcgctataccatgctgtcacagttagattttaaaatctttggtttgcacactgtgaaagatcaatatgttgatgatgctgattttaaagatgctttcggccactgtattaatgggaaaccatggggcaaatttcacatacaggatgggttcctgtttcgcgctaacaagctgtgtgttctagctagctcggttcgtcttttgttgttacaggaagcacatggaggcggtctcatggggcactttggcgtctacaagacacatgaggtgttggctgcccacttcttttggcctcagatgcgcgctgatgttgagcgccttgttgcacggtgcactacttgtcagaaagctaagtcacggttgaacaaccatagtttgtatatgcctttgcctgttcctacttccccttggattgatatttcgatggattttgttttgggattgcctagaactaagaaggggagggatagcatttttgtggttgttgatcgattctcc

SEQ ID NO: 619 - DNA, 1679 bp, Zea mays
  source (0)...(0): Zea mays BAC clone full insert sequence contig bacm.pk108.h15-2.fis16
cagccataggaggtggtgtatcggttgctaaggcgcagcgtctttggaaggctgtagtcgggccgtgaacgtcgtctcctcccccaatcgagttattccacaccctctcatcgaaagatcgggcaatcacccaacgggtgcacatcagttggtaatcagagcaaggtttatcggtgagagatttacttttcttcgctgttttcttatctcctatagtccagaaaaagccaaaaaatagtagattagttttaccacaatcctataaaccattgagcatttgctagtactacttagttagggcttgttgagtttttggttgcatcggttgtgtcgagttgctggtcttagtttattcctttagagttttgagttctaccacgttttggtcaccacgagatccaccatcaccaaaaatatctctggttcgtttttgccaccacggatacatatcatatccgatttggaagtttaaatacaatctggaaagcttatcttatcttctttccaacggatctgaccttatctcaaaattcgttctgagcgctccgcaatcatcgtagagatttctggactttctatattaacaagatttgttaaatctgatttaaaggggctgttagcaatatctttattgtttgggttgtcatagtgaaaaaaaaggtttaggcccctgcaaaaaaaaacagaagaagaagaaaaaaaaagaatagaaaagaaaaaaaaaggaaaagaagaagaagggggctgaatctctaaatctgttgtttctctttgtgctgtgctagttgttctttttcagtgactacctttgtgcctaggctcacgtctctagcctggtttagcctaggaccagcacagtaccaccgttgaacgattattcagcttgcttttgtaactaacgtggtactagtgtattccttgcttcagcccacctacaactctacatatttcgactacagtttgacaggtcgtgttgctgcggcaccgatacacttattccacggttgcagacttgttggttgctgacccctcctgttgtgcaaggtaagaattggtaagagcttgtgtggcaggttgagagtgagcgccttgcagtagctacatcctaatagttgtagagttttcattccttcacgttttttttcttgttgcctctgttcgtctaaccatggcaggattggaggttgatgatgcttctcgtaatatgccacactctcctcgcaccaagggtatcatacaacactttgtaaggctggtgaagacgcacacggaaggtcttgataatgacatgcaggtgacgaatgaaaagatggggcaattggaggccacacagatcgacacaaacaccaaacttgcaaatgtggaaatgacagttgctcatattgacaagagccttgtcgcactcttgaggcggtttgatgagatgcatgctaatatcaatggtgggcgtgatgagggcgccgaaggtaactgggatgactatgttgctgataccgaacaagatgaccaagaagcacctaatcgccggcgactacgtactaaccgtagaggtatgggtggttttcgccgacgtgaggtacatggtaatgatgatgcttttagtaaggttaaatttaaaatacctccttttgatggtaaatatgaccccgatgcttacattacttgggagattgcggttg

SEQ ID NO: 620 - DNA, 1904 bp, Zea mays
  source (0)...(0): Zea mays BAC clone full insert sequence contig bacm.pk108.h15-2.fis17
tcaaggccaaaccacacgacgtgcacgaccacggcgatctcctattcctgctcagtgtcaccgccgtattcctgctccatctttgtggtcaatgcatcaaggcgtgccaggatggtgtcgagtgtggtgcgagtcgccgtttgagcaaggtcaagttggttgaaacgctcggtcgtcgaagtgatcgttgaatcaagccgttcatgcatcgtcctaatgtcagcagcaagtccatcaacttgtccccttacttcctgcaactgggcatccaccatgtcgtgtgctcctgccatagttagcgcaaacaccaaaaggagaaaaaccaacgacaaaaacaggggtgtactgctcacaaggcgctcacactagtgctgttatcaagttcttatccgttcttaccaagccacagtggtgaactgcaatcaacaggtggaaccggtgaaagattggatgagcgattgcgtggagaaacagaaacctgctcgtcgtagaaatatgtggagttgtgggtaggctgcactcaagtcaaggattagcacgatcaaacaataatgcaaagttgaattatagtgcaaaacacgaaactatattgctggccacaggtgcaaaggatggatggatggaaatagcagaatggcagtaacgtaaatattgtactagtgatgccaaaaaggcactagtagaaatcacaggtgattttgtttttcttttttgtatgatttttttgatatttttctcagcacaagaagcaacaagataggagctacacgaagtttcacctaaaacagatatcagatgtggtctacagaaaatcaggaagttctctgaaaagcgtgcgagaactttgacgaatttttttctttattttcctgaatttttttgacaattttgtcgaaccccaaacagaccgtaggtgagtttggccgggatcagaatggtgtcaactagctcctgtaaaaatttcagattttttggacacccgagcgaaaagttatgcccgatttacggaaggtaactcaagttatgttctagtgatgcgaccgggatgaaacaaccgtatcctttctccttcgttatcttttttttctgtttttttgacgtaaccgaaggagaaaaacaaggaagcgatgttgactcggtttgtggcgtgatcaaaagggagatggtggcggcgctagggtttgaatggtggaagaacacaatgcaaccagcaacaaatgacgcgaaagcacacaaattcaacaatgcagattattgaaagaaagtgcgaggctcaaaagggtgctgggataagatctaacctgaatttttatgtggttttgtggactgtaggaaaaaaaacgctcgataaactcaccgatcaacctggaaatctgataccaattgatgaagctgaagtgcccgatctttcggcgagtagagataattccgatttggcggaagatgacccttgcgatccgactacgacgagcaagcccgaggcgccaatgcaatcgctgaaccaactccctgtggttaccgaccttgctgatgcgagatcggcctgatcacgaagatcgtttcctgtgcgcaatcgaagaacgaacaagaacaagatgcgagcaatctaatctattactcgagggtggagttctgaatacacgaagacagcgcagatttgcgcgtgttcgagagtagctaaggctaacgtaaaacaaaactccgaaataaaggaggcgcagctcctgaataaatagagagggggcgcagcccctaggggcggccaaccctaggtcgtccattatgggccgcaattgggctggtcgtctattcttccgggccttcgttctttaacaacatgatgtagttcaattctcttgcacgggcccgagtcactggcccaggtggaaggggtggcgcctggg

SEQ ID NO: 621 - DNA, 1832 bp, Zea mays
  source (0)...(0): Zea mays BAC clone full insert sequence contig bacm.pk108.h15-2.fis18
  misc_feature (1)...(1832): n = A,T,C or G
ttaccttaattgggattgcctaggactaggaagggacgtgatagtgtgtttgtggttgttgatagattttctaagatggcacatttcataccatgtcataaaactgacgatgctactcatattgctgatttgttctttcgtgaaattgttcgcttgcatggtgtgcccaacacaatcgtttctgatcgtgatgctaaatttcttagtcatttttggaggactttgtgggcaaaattggggactaagcttttattttctactacatgtcatcctcaaactgatggtcaaactgaagttgtgaatagaactttgtctactatgttaagggcagttctaaagaagaatattaagatgtgggaggactgtttgcctcatgttgaatttgcttataatcgatcattgcattctactacaaagatgtgcccatttcagattgtatatggtttgttgcctcgtgctcctattgatttaatgcctttgccatcttctgaaaaactaaattttgatgctactaggcgtgctgaattgatgttaaaactgcatgaaactactaaagaaaacatagagcgtatgaatgctagatataagtttgctagtgataaaggtagaaaggaaataaattttgaacctggagatttagtttggttgcatttgagaaaggaaaggtttcctgaattgcgaaaatctaagttgttgcctcgagccgatggaccgtttaaagtgctagagaaaattaacgacaatgcatataggctagatctgcctgcagactttggggttagccccacatttaacattgcagatttaaagccctacttgggagaggaagttgagcttgagtccaggacgactcaaatgcaagaaggggagaatgatgaagacatccacactactgatacatctatgccaatacaagtaccaatttctggtcccattactcgtgctcgtgctcgtcaactcaaccatcaggtgattacactcttgagttcatgtccatcatatttagaccatggagacccttgcactcttgttttgcttaggaaccagggagaagaccgaaatggaaaaggatttgaacatgctggattcggactgcagaagaacaccaacttgtgacggtcaccacggtcagatgcgggctcggattggaatgttcaagcacaacatggaaagcttatcaagtctactttcatatggatccggaattatagtcatatctgttctgaggccgccgtaatcattgttttcttaccgagacatttcctgccttttctgcccatggtgctgcgtcaccctattttggcccaatgggtcgtgtatcaagttaggtccattagggacgcatcctagggttgcagcacgaccccaatacccttgtggtcgtcctcccatgtttataaaccccctagccgccaccaagaacagcgggttttgtttagatcaagtttagctctcgctacttgcttgtaagcgcgcgtgctggttcagccgcncgtcttcttgtcttcggnaccccaccatattggagtttgattttgaacctacatttagatctgggtattcagtactttgtctacntgttcttgctagttcntcnattgcntgcaggacgagtgcctantgggccagggtgtcacgctcccaagaacgtgacaaccctaagagggggggatcggtttgctaagccaccgcccttggaaaggttgattcgggccggaaactcctccccttccccatcgggttttccaacccctccctccaaaaaaggggaaccccccaggggggccctcaaaaaaccggaaacccccggaaaccggaaattgaaacctgtt

SEQ ID NO: 622 - DNA, 2167 bp, Zea mays
  source (0)...(0): Zea mays BAC clone full insert sequence contig bacm.pk108.h15-2.fis19
  misc_feature (1)...(2167): n = A,T,C or G
gcagaaaagcttcggcatgttcgcagaaaagggaaccgacttaaagatgaaaaggccatttgacctcgatagaatgctatagaattatcaccaaatgtaaagggcatgtatgtaattttgtgtgggttgtaccccgtgcctataaataggtgaacagtacccccgtactgttcacgctgatctggcatttgcttntgcgtcacacttgtattttcatctccttccaagccgaaggtacatttataattcgatattgtttctatttctttatgatgatataataaagttaaatgaatgatgttatatgattattcatgctatcttttatgtttcatatgcttcatttttcattaatgtatactgtgatgacgaaggttcgtccttcatggccttcgttcgaagatcgttatatcctaagggaaataatgcttcgaaggacgaaggactttatcgtttaacattctctgtgttgccttgttcttaactcatagcatttgagaacaagtccccaacattggcgcccaccgtggggtgaactcacttccatttcttgagctttttgacatcttcggcaagcatcaccttcgtcatgccgccgaagaaggcttcagcaccaggggctggcacgctgcagtcgctggaccccaatcaagacgtcctttctcttagagaggcacgaagccagaagaggaagactaccagtccaacacctccggaggatgatctagatcaggagattcaaaatctggaaatccttcagcagcaggttcaacgcaagaaggagaagatggccaggctagttgaattgcagaggcagatagatgaagcctctgaagaagttcgtcatcttgctcaggatgagcaacaccgaaggcctcagcatcaagaccttcatcaggagggctttcccaacgaagatgactggtatgacaatttccatcatgggaattttgtttttgatgatgcttctcccctgtccgctgagttacaggctacaccttggcctccgtcctacaagccgcctcagctccccgtatttgatggccactcagacccgaagcagtttttgatgagctacgaagcaacagtgtcttcgtatggtggcaatgcttcagtcatggccaaatctttcgttatggctgtcagaagtgttgctcaaacctggtattcttcccttcgaccaggaacgatcacttcatggcagaagctgaaggatttgttgttaaccagctttcaaggatttcagacgaagccggtcactgctcaggctctgttccagtgcactcaggaccacgaagaataccttcaggcatatgtccgaaggttcttgcgtctgagggcacaggcaccaacggtgcccaatgaaattgtcatcgaggccatgatcaaggggcttcggccaggtccgtcagctcagtacttcgccaggaagcctcctcaaactttggagaagcttctccagaaaatggatgaatacattcgggccgacaatgattttcgccaaagaagggaggaggctttcaggttttctgaaatgaccaggggcttcggaggaagattttacccgaggcatgtgagatcaattcacaattccacacaaaatgatgacagaggaagccaacagcaaaggccacaatgctcctcacaggcttctggtcaacagcaaagctcattccggccaccagctccaagaggcagaggcgccaggggcttcggaggaagatttgttgatcaaccgagaagaatcttttgcttattctgcggtgagaacaaaggccatactaccaggatgtgccatgttactatacagaagcaaaaggaaatagctgaagcagcagcacaacaagcccagccgaagcaggttatgcatacagcttcgtatcattcgccctacatcccagaatatgtgggcaaccatcctgcagtctctgctgcttcggcgagtcagcttcaagcttcctggcaacagcctccgcctccacctccgttgcaacagggccagcagccagaagggagccaatatgctccacatcaaagggacttcagagaacagtccgaagctcgcacggtcaacagcaccgtgccagaatcaaagcacatctattgacaaatatcctaccttaatagcaatctttttcattcagttttattttctgtaataagaaca

SEQ ID NO: 623 - DNA, 2666 bp, Zea mays
  source (0)...(0): Zea mays BAC clone full insert sequence contig bacm.pk108.h15-2.fis20
tgtgccgtttgcttggagtgattcgcaggaggaagcattcagcactttgaaagataagttaacccaagctcccctattgcaattgcctgattttaataaagtgtttgagcttgaatgcgatgctagcggtgttgggctaggtgctgttttgttacaagaaggaaaaccagttgcttattttagtgaaaaattaagcggtgctagtctgaaatattctacttatgataaggagctttacgcgttagtgcgcactttgcatacatggcagcactatctttggcatcgtgagttcataattcattctgatcatgaggctttaaaacgtattcgtacccaaacaaatctgaaccgtcgtcatgctaaatgggtagaatttattgagtcttttccttacattattaaacacaagaacgggaaggacaatgttattgctgatgctttgtctcgtcgctataccatgctgtcacagttagattttaaaatctttggtttgcacactgtgaaagatcaatatgttgacgatgctgattttaaagatgctttcgaccattgtattaatgggaaaccatggggcaaatttcacatacaggatgggttcctgtttcgtgctaacaagctgtgtgttccagctagctcggttcgtcttttgttgttacaggaagcacatggaggcggtctcatggggcactttggcgtctacaagacacatgaggtgttggctgcccacttcttttggcctcggatgcgcgctgatgttgagcgccttgttgcacgctgcactacttgtcagaaagctaagtcacggttgaacaaccatggtttgtatatgcctttgcctgttcctacttccccttggattgatatttcgatggattttgttttgggattgcctagaactaagaaggggagggatagcatttttgtggttgttgatcgattctccaaaatggctcatttcataccttgtcataagactgatgatgctagcaatgttgctgaattgttttttagagagattattcgtttgcacggtattcccaatacaatagtctcggatcgtgatgctaagtttctgagtcatttttggagatctctgtggaataaattgggaactaaattgctatttagcaccacttgtcaccctcagactgatggtcaaactgaggtagttaatcgaactttgtctaccatgcttagggctgttttagacaaaaatttgaaacgttgggaggattgcttacctcatgttgagtttgcttataatcatgcaacacattcttctacaaagatgtgcccttttcaaattgtttatggttacattcctagggcgcctattgctttgttttcgcttgatgctgcggacgccccacacatagatgctcttgcacatgttgaacaaatgattaatctccatgaacaaactcaacaaaacattgctgctgctaatgctaaatatcagattactggtagtaaaggccggaaactagttacttttgaacctggtgatatggtttggttgcatttgagaaaggatcgttttcctgctttgcgccgttctaaattgatgcctcgtgctgctggtccttttaaggtactaaccaagattaatgataatgcttatatccttgacctgcctgcggagtttggtgtttccactagttttaatgttgcagatttgaaaccgtatgcgggagaagatgaggagttgccgtcgaggacgacttcagttcaagatggggaggatgatgcggacatcaacaccaacacgagcacatctacaccagcagcaccttctccagcccaggcgccaccccttccacctgggccagtgactcgggcccgtgcaagagaattgaactacatcatgttgttaaagaacgaaggcccggaagaatagacgaccagcccaattgcggcccataatggacgaccttgggttggccgcccctaggggctgcgccccctctctatttattcaggagctacgcctcctttattttgggagttttgttttacgttagccttagctactctcgaacacgcgcaaatctgcgctgtcttcgtgtattcagaactccaccctcgagtaatagattagattgctcgcatctttttcttgttcgttcttcgattgcgcacaggaaacgatcttcgtgatcaggccgatctcgcatcagcaaggtcggtaaccacagggagttggttcagcgattgcattggcgcctcgggcttgctcgtcgtagtcggatcgcaagggtcatcttccgccaaatcggaattatctctactcgccgaaagatcgggcacctcagctacatcagacatcactatgagtacgactacaccagcagtgatgaggacatcactatgccacttccttcattagctgggccaatcacttgggcccgtgccagagatcttaacttcgtcatgctactgaaggcggcccatagtggacgacctagggttggccgcccctaggggctgcgccccctctatttatccaggagctgcgtctcctttattttggagttttgttttacgttagccttagctactctcgaacacgcgcaaatctgcgctgtcttcgtgtattcagaactccaccctcgagtaatagattagattgctcgcatctttttcttgttcgttcttcgattgcgcac

SEQ ID NO: 624 - DNA, 3071 bp, Zea mays
  source (0)...(0): Zea mays BAC clone full insert sequence contig bacm.pk108.h15-2.fis21
atcagaaaagaagacagaggcccaacactatgcccaaaagttgaaatatccaaagggggcgttgatatttaatggcagtgagaagaagatttcttgtattgcctccccgacagcaaggaaatttctgtctgtcgggagatgagcagaagcttcggattcccaactttagaagacggactttcggtgctgtcaaagaacgatctggctgacagcctagcttacaacagtttaaaggtgcgacaaatagaattcttatatttttgttgagttcaagatttttcgtttgtttaaaactattaacacagacatattcctgtctgcagggcctgatactcagcaatgccctcagagcacagaaagatgctgaggacgaaggatgtactatagccctgagcaaccttcgttccgaagtaattgaactgaggaacgaaggtctcgaaaaagacaaaatattgcattccttaataaataaaataaaagaagacgaagctattttcaaaggtcaggccgaagctcagaagtgtgaaattgaaaaccttcgtaaacaattagccagagctaaagaggaatgcatacttgaagaaacaaggcgagaactcagcgaccaatgggcaaatcatttagaagaaactgttaaagagcttcggtcagccaagaagaaatgcttcgacaaatctatagagtgtgtcaagaaaataaaaactagcttcgccagcgttggcgcattttcgcaagaagaaaactttataagaggtaaccccgaaggtcccctggaatggatcaatcatgaggcggaggcctttgaagaaattttaaatagtcgcggagacatctgcgctttttctggtgccagagggattgccactattttggaggggaaaggatgtgaacatgtaaagattttatcgcagtccgaagccaccttgtccactgaagatataaaagatccttcagccgaagctagcgcggttgggggaaaatttttcaccgacatctgggacaacggtggtagagaaatggcccaagaaatcattcacaaaagcgagaaagggattcatgaggctagaaaagtagccgaggctgctgagaaaaacgcagagcccgaagggcaaataggtactaacgaatagttttcattgcattataacttttaattttatagttcgttcgcgatctgtaataatgatgtaatagtatcccgtcctcactcagttcctactaaagcatcttcgggccctcagcctaaagatgacgacgaaattaaaaagatggccgaagctatcatggatcaagttgtcgatcgactgctgaacgaagctgcagagatagtacttagggaagactaagtgctattggagaaaacatttgatatatgatttgtgtaatattctgtaatcctgtatgtaatatacttgttttatgattcaattctttacgatgcatgaaactttaaacacgtaccatttttgagtcttcgacgaaaaaacaccttcccttcttttcatgcttcgtgaagaagaatttatcatttatcacgacaatatccatagtgttctgataagaaatatccaagcttcgtaaaaataatctccgaagctatacctcgaaaatcaatattgtttctccctgtaacttggcatgatttgccctttttcaaagcattttccgaagatcgataacatgcccccttcttgtgccacatgcagcatgatgtatgatgattatgctatgcaaaatgatgtgatgatgttatgttatgcaaaatgatattttgtgccgaagatacgcacattcctgcaatggggcacaatcttttgtatcaatactgactttttcattataagcctcccttaggagcttcttcgccttttacttcagcggaatcagcgtttatttttcgctgtaagttctgcatccccttaggaacgtctttggaacttcttcgccttttacttaggcggtataagctctgcattcccttaggaacgtctttggagcttcttcgccttttacttaggcggtatcagcgttgacttttcgctgtatgctctgcattccttttggaacgactttggagcagaaaacttacactgcgctcccttcggaacgactttttgtgacttcgtcagacttactctgcgttccttagaacgactttttgttgcttcgaaggattttcgatagtccgaaggtcctttttattatcacaaacctgtgaagaaaacatatttttcttgtaggaatcaacgaaactaattacatgaaacctaaacaatgtcctttattacaaaaaataaaactgaatgaaaaagattgctattaaggtaggatatttgtcaatagatgtgttttgactctggcacggtgctgttgaccgtgcgagcttcggactgttctctgaagtccctttgatgtggagcatattggctcccttctggctgctggccttgttgcaacggaggtggaggcgggggctgttgccaggaagctgaaggctgacttgccgaagcagcagagactgcaggatggttgcccacatattctgggatgtagggcgaatgatacgaagcagtgtgcatgacctgcttcggctgagcctgttgcgcggcagcttcggctatctctttttgcttttgaatggtaacatgacacatcctggtagtatgacctttgttttcaccacagaataagcaaaatattcttctgggttgatccccgaatcttccgccgaagcccctggcgcctctgcctcttggagctggtggtcggaaggagctttgctgttgccccgaagcctgtgaggagtactgtggcctttgctgctggctccccttatcatcattttgattggaattatgaattgatctgacatgcctcggatagaatcttcctccgaagcccctggtcatctcagaaaatctgaaggcctcctcccttctttggcgaaaatcattgtcagctcgaatatattcatccatcttctggagcagcttctccagcgtttgtggtggcttcctggcaaaatactgcgctgatggccctggccgaagccccttgatcatggcctcata

SEQ ID NO: 625 - DNA, 2855 bp, Zea mays
  source (0)...(0): Zea mays BAC clone full insert sequence contig bacm.pk108.h15-2.fis22
  misc_feature (1)...(2855): n = A,T,C or G
tttttggggcggttaaattggggaaattcaagccatccttgcttataaagattatgctaatgtaacccgattatttcattcttgtttgcaaagctgaaaggaaagtgcagggacgacgtgctagtgcaaggtctaatgtttctgcaggaaaatctacaccatggcaacagcgcacgactacgtccatgaccggccgtacaccagctccaactcccttgccaagtcgaccagcacccccgccttctccgggcgacaaaccacgtgcaccttccacaaattcagcaaccaaatctgcccagaaaccagcaggtagtgcctcttcagtagcctccacgggtagaacaagagatgttctgtgttatcgatgcaagggctatggacacgtgcagcgtgattgtcctaatcagcgtgtttttggtggtaaaagacgatggtgggtattcctctgctagtgatttggatgaagctacacttgctttgcttgcggctgatgatgtaggcactaaggaaccacccgaagaacagattggtgcagatgatgcagagcattatgagagcctcattgtacagcgtgtgcttagtgcacaaatggagaaggcagagcagaatcagcgacatacgttgtttcaaacaaagtgtgtcattaaggagcgttcatgtcgtttgatcattgatggaggtagctgcaacaacttggctagcagcgacatggtagagaagcttacacttacgaccaaactgcacccgcatccatatcacattcaatggctcaacaatagtggtaaggtcaaggtaaccaagctggtacgaattaattttgctattggttcatatcgtgatgttgttgactgtgatgttgtgcctatggatgcttgtaatattctgctaggtagaccatggcaatttgattcagattgtatgcatcatggtagatcaaatcaatattctctcatacaccatgataagaaaattattttgcttcccatgtcccctgaggctattgtgcgtgatgatgttgctaaagctaccaaagctaaaactgagaacaacaagaatattaaagctgttggtaataacaaagatgggataaaattgaaaggacattgcttgcttgcaacaaaaactgatgttaatgaattatttgcttccactactgttgcctacgccttggtatgcaaggatgctttgatttcaattcaagatatgcagcattctttgcctcctgttattactaacattttgcaggagtattctgatgtatttccaagtgagataccagaggggctgccacctatacgagggattgagcaccaaattgatcttattcctggtgcatctttgccgaatcgtgcgccatataggacatatccagaggaaacaaaagaaattcagcgacaagtgcaagaactactcgacaaaggttatgatgaagacatccacactactgatgcatctataccaatacaagtaccaatttctggtcccattactcgcgctcgtgctcgtcaactcaaccatcaggtgattacactcttgagttcatgtccattatatttagaccatggagacccgtgcactcttgttttgcttaggaatcagggagaagaccgaaagggaaaaggatttgaacatgctggattcggactgcagaagaacaccaacttgtgacggtcaccacggtcagatgcgggctcggattggaatgttcaagcacaacatggaaagcttatcaagtctactttcatatggatccggaattatagtcatatctgttctgaggccgccgtaatcattgttttcttaccgagacatttcctgccttttctgcccatggtgctgcgtcaccctattttggcccaatgggtcgtgtatcaagttaggtccattagggacgcatcctagggttgcagcacgaccccaatacccttgtggtcgtcctcccatgtttataaaccccctagccgccaccaagaacagcgggttttgtttagatcaagtttagctctcgctacttgcttgtaagcgcgcgtgctggttcagccgcccgtcttcttgtcttcggaaccccaccatattggagtttgattttgaaacctacatttagatctggtaattcagtacttgttctacttgttcttgctagttcttcgattgcttgcaggacgagtgccctagtggccagggtgtcacgctccacaagatcgtgacaaccataggaggtggtgtatcggttgctaaggcgcagcgtctttggaaggctgtagtcgggccgtgaacgtcgtctccttccccaatcgagttattccacaccctctcatcgaaagatcgggcaatcacccaacgggtgcacatcaaaaacactcgataaactcaccgatcaacctggaaatctgataccacttgatagagctggagtgcccgatcttttggtgagtggagataattccgatttggtggaagtagaccctcacgatccgactacgacgagcgaacccgaagcgccaatgcaatcgctgaaccaactcccaatggttaccgaccttgctcctgcgagatcagcctgatcacgaagatcgtttcctgtgcgcaatcgaagaacgaacaagaaaaagatgcgagcaatcttaatatcactcgaggtggagttctgaatcacagaggacagcacgtatttgtgcgtgttctggggtagctaaagctagatctaagacaaaacaccaaaaataaaggaggcgcagctcctggataaatagnagagggggcgcagccccctagggggcgccaaaccctaggtcgtccattatggggcgcanttgggctggtcgtctattcttccngggctttcgtctttaaca

SEQ ID NO: 626 - DNA, 3129 bp, Zea mays
  source (0)...(0): Zea mays BAC clone full insert sequence contig bacm.pk108.h15-2.fis23
  misc_feature (1)...(3129): n = A,T,C or G
ataggaggtggtgtatcggttgctaaggcgcagcgtctttggaaggctgtagtcgggccgtgaacgtcgtctcctcccccaatcgagttattccacaccctctcatcgaaagatcgggcaatcacccaacgggtgcacatcataaccgctacgcaaatcaaccttagagaaaataacggcaccactaagctcatctaacatatcatcaaggcgtggaataggatatcgataacgaactgtgatgttattaatagcacgacaatctacgcacatacaccatgacccatcttactttggaacgagtaaaacaggaaccgagcaagggctaagagactcacgaatgtaatccttatcaagcagcgtctgcacctggtgctggatctccttcgtctcctctggatttgtacggtacggggcgcggttcggaagagaagcgccggggatgagatcgatctgatgctcaatgccacggaggggaggaagacccggtggtaagtccgtaggataaacatcagcatactcctgcaaaaggttaacaacagcagggggtatatccaaagacggtgcatcatcaagcggaacaagcatgcgcgagcatacaagtgcataacagggcatatgagcttcatggagatcatcaaaatcagcacgtgtagcaagtaaaacaggagagtgcaacttgatttcagatttaataggtgcggctgatgtcgatttgacttgttgtgcagttttagcagccctagtaagatcatctttcaaaatttggtcaggggtcattggatgtataattattttctggcctttaaacatgaaagaataatgatttgaacgaccatgatgtaaactatcagtatcatattgccaaggtcgacccaataacaaagagcatgcttccataggaataacatcgcaatcagcataatcagaataagaacccagcgaaaaggggacacgtaccaaacatgttacctttattttaccaccatcattaagccattgaatgtgatacggatgtggatgtgtgcgagtgggcaaggataatttctctaccaacgctgtacttgccaaattgttgcagctgccactatcgatgatgatgcgaatcgaccgttcgtgcacgacgcccttggtatggaatagagtgtgtcgctgatttttttcggcctgggcaacctgtgtgctgagaacacgctgcacaacaagactctcatacctatcggcgtcgatgggatcaacgtggacttcctcattttctgcatggttagtggcaatcatagcatgactagtttcctcagaatcactggctgaagagtactcaccattgtcacgtataagcaaggtacgcttgtttgggcagtctcgaatcatgtgcccaaaccctctgcaacgatggcactgaatatcccgtgtacgtcctgtggaagaaccagcgcctttggcagggggcgccactggcttggtcgtccttgtgcgcgatgtagtgctaggcgtagaaggtgcagggctggaaggagttgagctgtgtgttggaccccggcctgcaaaagagttagtatatgtctttgatcgtcgtccctgcacttcacattcagctttgcaagcatattcaaacaatgtggttatatcaaaataatccttataatcaagtatatccagaatttccctgttcaaaccaccacgaaaacgcgccatagcagcgtcatccgactcaaccaaaccacaacgaagcatacccttttgtaacttgttggggaccttcggcgtccgaaggtcctcaaaaacagaatttaacagtatttctgtagtacaatatgtgaacaggtaccctcagactaaaatcggcattgcagcagaccggaataatacgaagcttgatacagagccgaagctgttgagcaggaaagcttcggcgtaacagcagagagtggaaccgacttaaagatgaaaaggctattcagacctcaatagattactatagagttattgttagatgtaaagggcatgaatgtaattttgtaagggctgtgtcccgtgtctataaataggtgaacagtatccctgtactgttcacgctgacttggcattcgctttttgcgtcacgcttgtacaatcatttccttccgattgaaggtacacttgttgttcaataatatttttgtttatgttcaataataataaatgattgttcatgttttcctttacattcttcacatttcatccttcgtcattatttgattaatttatgaaggtatgtccttcataaccttcgtccgcaaggcattatgtcctaagggaaatagtgcttcgaaggacgaagggcattaacgattaacattttctatgttgccttgttcttaaactcttagcacttgagaacaagtccccaacattggcgcccacctccggtgaactcacttccatttcttgagctttgaataccttcggcgagcgtcaccttcgtcatgccgccgaagaaggcttcaacaacaggagctggcacactgcagtcgctggatcccaatcaggatgttatttctcttagagaagcccgaagccagaaaaggaaggctgtcagtccaacacctccggatgatgatcttgatcaggaaattcaaaatttagagatccttcagcaacaagttcagcgcaggaaggaaaagatggctcgtctagctgatcttcagagacagatagatgaagcttcggaagaggtccgtcatttcgttcaaggcgatcaaacccgaaggcctccacgcagagagcttcatcaggaagatttccgcaatgaagacgactggtatgaagatctccatcatggaaactttgcttttgatgatgcttctcctctttcaacagaattgcaggctacaccttggccacagacttacaagccaccccagcttcccatatatgacggtcactcagacccgaagcaattcctaatgagctacgaggcaacaatatcttcatacggtggcaatacngcagtcatggcaaaatccttcgtcatggccgtcagaagtgttgctcaaacctggtactcttctcttcggccagggacaatcacttcntggcgaaactgnaggaatgctcataactaggttccaagggttcaaacaaagcggt

SEQ ID NO: 627 - DNA, 2841 bp, Zea mays
  source (0)...(0): Zea mays BAC clone full insert sequence contig bacm.pk108.h15-2.fis24
gaccgcgtatagactcctatcgggcgagggggttccctaccctcgtcgaggtcgacggtatcgttccgcaaagaggggcacatttaacattgcagatttaaagccctacttgggagaggaagttaagcttgagtcgaggacgactcaaatgcaagaaggggagaatgatgaagacatccacactactgatgcatctataccaatacaagtaccaatttctggtcccattactcgcgctcgtgctcgtcaactcaaccatcaggtgattacactcttgagttcatgtccatcatatttagaccatggagacccgtgcactcttgttttgcttaggaatcagggagaagaccgaaagggaaaaggatttgaacatgctggattcggactgcagaagaacaccaacttgtgacggtcaccacggtcagatgcgggctcggattggaatgttcaagcacaacatggaaagcttatcaagtctactttcatatggatccggaattatagtcatatctgttctgaggccgccgtaatcattattttattaccgagacatttcctgccttttctgcccatggtgctgcgtcaccctattttggcccaatgggtcgtgtatcaagttaggtccattagggacgcatcctagggttgcagcacgaccccaatacccttgtggtcgtcctcccatgtttataaaccccctagccgccaccaagaacagcgggttttgtttagatcaagtttagctctcgctacttgcttgcaagcgcgcgtgctagttcagccgcccgtcttcttgtcttcggaaccccaccatattggagtttgatctttaaacctacatttagatctggtaatttagtacttgttctacttgttcttgctagttcttcgattgcttgcaggacgagtgccctagtggccagggtgtcacgctccacaagatcgtgacagccataggaggtggtgtatcggttgctaaggcgcagcgtctttggaaggctgtagtcgggccgtgaacgtcgtctcctcccccaatcgagttattccacaccctctcatcgaaagatcgggcaatcacccaacgggtgcacatcagaaggtgctgctggtgtagatgtgctcgtgttggtgttgatgtccgcatcatcctccccttcttgaactgaagtcgtcctcgacggcaactcctcatcttctccctcatacggtttcaaatctgcaacattaaaactagtggaaacaccaaactccgcaggtaggtcgagggtataagcattatcattaatcttggttagtatcttaaaaggaccagcagcacgaggcatcaatttagagcggcgcaaagtaggaaaacgatcctttctcaaatgcaaccaaaccatatcaccaggttcaaaagtaacatgttttcttcctttactaccagcaacctgattttttgtattagtagcagcaatgttctgtttcgtttgttcatgtatggtaatcatttgttcaacatgtgcagaagcatctacatgtggggcgttcgcagcattaagtgaaatcaaatcaataggtgccctaggaatgtaaccataaacaatctggaaagggcacatctttgtagaagaatgcgtggcatgattgtaagcaaattcaacatgaggtaagcaatcctcccaacgtctcaaattcttgtctaaaacagccctaagcatggtagataaagttctatttactacctcagtttgtccatcagtctgagggtgacaagtagtgctaaacaacaatttagttcccaatttattccaaagagatctccaaaaatggcttagaaacttagcatcgcgatcagagactattgtttttggaataccatgtaaacgaataatttctctaaagaacaattcagcaacaatgctagcatcatcagttttatgacaaggtataaagtgagccattttagagaatctatcaacaaccacaaaaatactatccctccccttcttagttctaggcaagcccaaaacaaagtccatagaaatatcaagccaaggagaagaagggacaggcaaaggcatatacaaaccatggttgttcaaccgtgacttagctttctgacaagtagtgcagcgtgcaacaaggcgctccacatcagcgcgcatccgaggccaaaagaagtgggcagccaacacctcatgtgtcttgtagacgccaaaatgccccatgagaccgcctccatgcgcttcctgtaacaacaaaagacgaaccgagctagctggaacacacaacttgttagcgcgaaacaggaacccatcctgtatgtgaaatttgccccatggtttcccattaatacaatggccgaaagcatctttaaaatcagcatcgtcaacatattgatccttcacagtgtccaaaccaaagattttaaaatctaactgtgacagcatggtatagcgacgagacaaagcatcagcaataacattgtccttcccgttcttgtgtttaataatgtaaggaaaggactcaatgaattctacccatttagcatgacgacggttcagatttgtttgggtacgaatatgttttaaagcctcatgatcagaatggattataaactcacgatgccaaagatagtgctgccatgtatgcaaagtgcgcactaaagcgtaaagctccttatcataagtagaatatttcagactagcaccgcttaatttttcactaaaataagcaactggttttccttcttgtaacaaaacagcacctagcccaataccgctagcatcgcattcaagctcaaacactttattaaaatcaggcaattgcaataggggagcttgggttaacttatctttc

SEQ ID NO: 628 - DNA, 2910 bp, Zea mays
  source (0)...(0): Zea mays BAC clone full insert sequence contig bacm.pk108.h15-2.fis25
  misc_feature (1)...(2910): n = A,T,C or G
aaggattgcttgcctcatgttgaatttgcttacaatcatgccacgcattcttctacaaagatgtgccctttccagattgtttatggttacattcctagggcacctattgatttgatttcacttaatgctgcgaacgccccacatgtagatgcttctgcacatgttgaacaaatgattaccatccatgaacaaacgaaacagaacattgctgctactaatacaaaaaatcaggttgctggtagtaaaggaagaaaacatgttacttttgaacctggtgatatggtttggttgcatttgagaaaggatcgttttcctactttgcgccgttctaaattgatgcctcgtgctgctggtccttttaagatactaaccaagattaatgataatgcttataccctcgacctacctgcggagtttggtgtttccactagttttaatgttgcagatttgaaaccgtatgcgggagaaaatgaggagttgccgtcgaggacgacttcagttcaagaaggggaggatgatgcggacatcaacaccaacacgagcacatctacaccagcagcaccttctccagcccaggcgcgaccccttccacctgggccagtgactcgggcccgtgcaagagaattgaactacatcatgttgttaaagaacgaaggcccggaagaatagacgaccagcccaattgcggcccataatggacgacctagggttggccgcccctaggggctgcgccccctctctatttattcaggagctgcgcctcctttatttcctgagttttgttttacgttagccttagctactctcgaacacgcgcaaatctgcgctgtcttcgtgtattcagaactccaccctcgagtaatagattagattgctcgcatcttgttcttgttcgttcttcgattgcgcacaggaaacgatcttcgtgatcaggccgatctcgcatcagcaaggtcggtaaccacagggagttggttcagcgattgcattggcgcctcgggcttgctcgtcgtagtcggatcgcaagggtcatcttccgccaaatcggaattatctctactcgccgaaagatcgggcacctcagctacatcacacaggaaacgatcttcgtgatcaggccgatctcgcatcagcaaggtcggtaaccacagggagttggttcagcgattgcattggcgcctcaggcttgctcgtcgtagtcggatcgcaagggtcatcttccgccaaatcggaattatctctactcgccgaaagatcgggcacctcagctacatcatgttgtgcttgaacattccaatccgagcccgcatgtgaccgtggtgaccgtcacaagttggtgttcttctgcagttcgaatccagcatgttcaaatccttttccctttcggtcttctccctggttcctaagcaaaataagagtgcacgggtctccatggtctaaatatgatggaaatgcactcaagagtgtaatcacctgatggttgagttgacgagcacgagcgcgagtaatgggaccagaagtaatgggaccagaaattggtacttgtattggcatagatgtatcagtagtgtggatgtcttcatcattctccccttcttgcatttgagtcatcctcgactcaagctcaacgtcctctcccaagtagggctttaaatctgcaatgttaaatgtggggctaaccccaaagtctggaggcagatctagcctatatgcattgtcgttaattttctctagcactttaaatggtccatcggctcgaggcaacaatttagattttcgcaattcaggaaacctttcctttctcaaatgcaaccaaactaaatctccaggttcaaaatttatttcctttctacctttatcactagcaaacttatatctagcattcatacgctctatgttttctttagtagtttcatgcagttttaacatcaattcagcacgcctagtagcatcaaaatttagtttttcagaagatggcaaaggcattaaatcaataggagcacggggcaacaaaccatatacaatctgaaatgggcaaatctttgtagtagaatgcaatgatcgattataagcaaatgcaacatgaggcaaacagtcctccaacatcttaatattcttctttagaaccgcccttaacatagttgacaaagttctattcacaacttcagtttgaccatcagtttgaggatgacatgtagtagaaaataaaagcttagtccccaattttgcccacaaagtcctccaaaaatgactaagaaatttagcatcacgatcagaaacgattgtgttggtacaccatgcaagcgaacaatttcacgaaagaacaaatcagcaatatgagtagcatcgtcagttttatgacatggtatgaaatgtgccatcttagaaaatctatcaacaaccacaaacacactatcacgtcccttcctagtcctaggcaatcccagcacaaaatccatagaaatatcttcccaaggaccactaggaacgggtagaggcaaatacaaaccgtgtggatttaaccgtgacttcgccttttgacatgtcgtgcaacgagcaaccaatctcaccacatctcttctcatctggggccaaaagaaatgaccagcaagtatgtcctccgttttctttgctccaaaatgtcccattaagccacctccatgtgcttcctgtaacaacaacaaacgaacggagctagctggaatgcatagcttgttagctctaaacacaaacccatcactaacgatatatttgttccatccntttccatctttancatgcagcaacacatcntttgaatcagcatcatatgcagaacactatngagagcctggttgtaagacgtgtcttgagtgcccaaattataaagctgaaacaaacagcgacancacctgttccaaactaaatgtg

SEQ ID NO: 629 - DNA, 3874 bp, Zea mays
  source (0)...(0): Zea mays BAC clone full insert sequence contig bacm.pk108.h15-2.fis26
tttctcttgctcgctcgatttttagcttttgcgcgctaagattccctgtgtctttagttttaaagcttcggcattgaaaatagttttttagtgtttccgaagatgtctggagacaagaaagctgttactgaggcgaaactgtctcttgatgaggaaaaaaacctggggtttcttatagcgatgtcgaagacaaacacggaaaaaatcaccaaggaaattctggaaggcttgtctgaagatactggtgacagtgacagttttgatgtagatagtggcggtgaagactccgaagatcgcccctggcgaccaagtcatgcggttttcggcaaatcagctatcaaagaaaaccatcttgccaatttgaggggaaggtatttccgggatctgtccattgtgagggctgacgaaggggaaaagacttgtccacaccctgaagaaaatgaagttgtggtgtaccgaagctttttgaaagctggattgcgattccccttgagcagcttcgtcgtggaggtgttgaaaatcttcgaagtctatcttcatcaacttactccagaggcgattataaggctaaatatcttcgtgtgggccacgagaagccaaggtctgaagcctgacgcaagaagcttctgcaatatacatgaattattatatgaaacaaagccttggggcaaagaacagtaccacaataactttggctgctacagtttcgtctctcggtccggggcaagctgtcccgtaccaacctttcggaagagatggcccggggattggatgacagaatggttttatgtgaagaatgacctatcagcacgagaagacatcaaaggtataatcatgcgtcctatttggcaaagcttcggccttcggaggccgaaggtggaaatgaatgaagctgccgaagaatgccagagagccttcggcgtcatctgctcttttatcggaacaagagatttagtacaaaaacatattgccttccgggtgtggccgcttgcggagaaatgggaaatgcctcaagaaactataaaagagaccgacgaaggtggtcttgtgagactgaagtacaccttcaagtttggagataaatttactgagcgagatgacgactggctaaagagtattgaaaatttaagtgacgaattgcttggtgcttattcgaaggccgaagatacggcgatgtcagcagccttcggaggccgaaaaaagaagaggctgaatcgggtatttgatgcaattgggtttgtttaccctgactattgctaccccgtccgaagacagaaaaggaagaacataacttctgcaaaagaagctgcaactgctcctagcgagccagagcctgaaagaaagaaaataaaagtcctcactcaccggccgcgttatatcgaaccagcttcggtgccggagtttactgagaaatcttcttcggttaccgaggctgaaaagccaactagaccagtcatgccacctgcagctgcagggataaccgaaacggcgaaaaagatagaactagaagaaccgaaggtttcgctgccagaaaccaaagaaatggccgaagcgctatccacagaaaaaattgcagaagtggaaaaaccaactgaagaaaaagtaccagaaattgtgagtcctgcagcaaatgttgagacaacaaaaaatcaaaaagcgccagcagtgactccaaaaagaagaagaatggcgaatgtgctagatgtactagaaacaattaagacttcaagcacacctccgaagaaggctgttgttactcctgaaacaacagctgaaatttctggttctacagctccagggcaagaaattgaagccgaagctgggccctcagagcccgcaaaggcaaaaaccttggaaagtgaggcagaaaaaataacaaagccaacctttgctgaagaaactggtgttgttacccccgaagcatcctccaaaattcgtgattatatttttcgtcatgcttcggggaaaaaattatcagaaaaagaacaacaagaggcccaacactatgcccaaaagttgaaatatccaaagggggcgttgatatttaatggcagtggagaagaagatttcttgtattgtctccccgacagcaaagaaatttctgtctgtcgggagatgagcagaagcttcggattcccaactttagaagacggactttcggtgctgtcaaaaaacgatctggctgacagtctagcttacaacagtttaaaggtgggacaaatggaattcttgtatttttttgtcgagtttaaaatttttcgtttgtttaaaactattgacacagacatgctcctgtttgcagggcctgatgctcagtaatgccctcagggcacagaaagatgctgaagacgaaggttgtactatagccctgagcaaccttcgttccgaagtaattgaactgaggaacgaaggtctcgaaaaagacaaaatattatactcattaatagataaaataaaggaggacgaagctgcttttaaaagtcaagctgaagctcagaaacgcgaaattgaagaccttcggaaacaactggcgagagccaaagaagaacgtatacttgaagaaacaaagcgtgaactcagcgatcaatgggcagatcacctagaagtgactgttgaagagcttcgttcatccaaaaagagatgctacaataaatctatagattgcgttaaaaaattaaaggctagcttcgccaaggtcggcgcattctcaagtgaagaaaacttttcgagaggcaatcccgaaggtgtcattgaatggattgaccatgaagctgaagccttcgaagaaattttaaatagccgaggagatatatgtgccttctctggcgccagagggattgccaccatcttagagaagaagggctgcgaacatgtaaaaattttagcacagtccgaagctgccttgtcctatgaagatacaagagacccctcggccgaagctagcataattggtggaaagttttttaccgatatctgggataatggtggccgagaaatggccggagaaattattcgaagaagtgaaaagggcattcatgatgctagagaagtagctgaggctgctgaaaagagcgcagaggccgaaggtcaattaggtattaaataatagtttttatcgtgttgtaatcttaggctttaagatttgtttgcaacttgtaacagcaaagcagccgtgtcctgtccttcctcagatcctactgaagtatctccgggtgcacggcctaagggtgacgatgagattaaaaagatggctgaagctattatggatgaagttgtcgatcgactgttgaacgaagctgcagaagtggtacttagggaagactagatgctattgtaaaaacattttaaatgtaacatatgtaatatcttgtaatcctgtatgtaacatatttgttttatttctctttatggttcaattctttacgatgcatgaaacttttcatacataccttttttgagtctggcgaaaaaacaccttcccttcttttcatgcttcgtgaagaaaaatttctatgtatcacaacaatgtccatagtgctcagatgaagaatatccaagcttcgtgaaaacattctccaaagctatactccgaagatgaagattgtgtctccttgtgacaacacgattttcactctttcaaagcatacttccgaagatcaatattgtgtccccttcttgtgccatatgcaacatgatgtatgatgctcatgctatgcaaaatgatgtgatgatgttatgttatgtagatgacatttgttccgaaagatacacacatatccccacacaatatttttgtattagcgctgattcttcgctgtaagctctgcattcccttaggaacgtctttggagcttcttcgccttttacttaggcg

SEQ ID NO: 630 - DNA, 4935 bp, Zea mays
  source (0)...(0): Zea mays BAC clone full insert sequence contig bacm.pk108.h15-2.fis27
cacaaaagccctccccttcttagttctaggcaagcccaaaacaaagtccatagagatatcaagccaaggagaagaagggacaggcaaaggcatatacaaaccatggttgttcaaccgtgacttagctttctgacaagtagtgcagcgtgcaacaaggcgctccacatcagcgcgcatccgaggccaaaagaagtgggcagccaacacctcatgtgtcttgtagacgccaaaatgccccatgagaccgcctccatgcgcttcctgtaacaacaaaagacgaaccgagctagctggaacacaaagcttgttagcgcgaaacaggaacccatcctgtatgtgaaatttgccccatggtttcccattaatacaatggccgaaagcatctttaaaatcagcatcgtcaacatattgatccttcacagtgtgatgaagacatccacactactgatgcatctataccaatacaagtaccaatttctggtcctattactcgcgctcgtgctcgtcaactcaaccatcaggtgattacactcttgagttcatgtccatcatatttagaccatggagacccgtgcactcttgttttgcttaggaatcagggagaagaccgaaagggaaaaggatttgaacatgctggattcggactgcagaagaacaccaacttgtgacggtcaccacggtcagatgcgggctcggattggaatgttcaaggacaacatggaaagcttatcaagtctactttcatatggatccggaattatagtcatatctgttctgaggccgccgtaatcattgttttcttaccgagacatttcctgccttttctgcccatggtgctgcgtcaccctattttggcccaatgggtcgtgtatcaagttaggtccattagggacgcatcctagggttgcagcacgaccccaatacccttgtggtcgtcctcccatgtttataaaccccctagccgccaccaagaacagcgggttttgtttagatcaagtttagctctcgctacttgcttgtaagcgcgcgtgctggttcagccgcccgtcttcttgtcttcggaaccccaccatattggagtttgatttggaaacctacatttagatctggtaattcagtacttgttctacttgttcttgctagttcttcgattgcttgcaggacgagtgccctagtggccagggtgtcacgctccacaagatcgttacagccataggaggtggtgtatcggttgctaaggcgcagcgtctttggaaggctgtagtcgggccgtgaacgtcgtctcctcccccaatcgagttattccacaccctctcatcgaaagatcgggcaatcacccaacgggtgcacatcacagtgtccaaaccaaagattttaaaatctaactgtgacagcatggtatagcgacgagacaaagcatcagcaataacattgtccttcccgttcttgtgtttaataatgtaaggaaaggactcaatgaattctacccatttagcatgacgacggttcagatttgtttgggtacgaatatgttttaaagcctcatgatcagattggatataaactcacgatgccaaagatagtgctgccatgtatgcaaagtgcgcactaaagcgtaaagctccttatcataagtagaatatttcagactagcaccgcttaatttttcactaaaataagcaactggttttccttcttgtaacaaaacagcacctagcccaataccgctagcatcacattcaagctcaaacactttattaaaatcaggcaattgcaataggggagcttgggttaacttatctttcaaagtgctgaacgctacctcctgcgaatcactccaagcaaacggcacatctttctttgtaagctcatgtagaggcgctgcaatggagctaaaatcacgaacaaatctgcggtagaaaccggcaagtccaagaaagctccgaatttgtgtgaccgtcgtcggtgtaggccactcccgaatggcagcaatcttgctgctatccacctcaatgccctgcggagtaaccacataaccaagaaacgagacacgttgcgtgcaaaatgtgcacttttccatgttaccaaacaagcgagcagcacgcaaagcgtcaaaaacagcacgcaaatgttctaaatgctcctctatagacttgctgtaaataaggatatcatcgaaataaacaacaacaaacaaacctatgaaggcccgtagaacttcgttcattaaacgcataaaaggtgctgggagcattagtcaatccaaatggcataaccaaccattcatataaaccaaatttcgttttaaaagccgttttccattcatcaccgagtttcattctaatctgatggtaaccgctacgcaaatcaaccttagagaaaataacggcaccactaagctcatctagcatatcatcaaggcgtggaataggatatcgataacgaactgtgatgttattaatagcacgacaatctacgcacatacgccatgacccatctttctttgggacgagtaaaacaggaaccgagcaagggctaagagactcacgaatgtaacccttatcaagcagcgtctgcacctggcgctggatctccttcgtctcatctggatttgtacggtacggggcgcggttcggaagagaagcgccagggatgagatcgatctgatgctcaatgccacggaggggaggaagacccggtggtaagtccgtaggataaacatcagcatactcctgcaaaaggttaacaacagcagggggtatatccaaagacggtgcatcaacaagcggaacaagcattcgcgagcatacaagtgcataacagggcatatgagcttcatggagatcatcaaaatcagcacgtgtagcaagtaaaacaggagagtgcaacttgatttcagatttaataggtgcggctgatgtcgatttgacttgttgtgcagttttagcagccctagtaagatcatctttcaaaatttggtcaggggtcatgggatttataattattttctggcctttaaacatgaaagaataatgatttgaacgaccatgatgtaaactatcagtatcatattgccaaggtcgacctaataacaaagagcatgcttccataggaataacatcgcaatcagcataatcagaataagaacccagcgaaaaggggacacgtaccgaacgtgttacctttattttaccaccatcattaagccattgaatgtgatacggatgtggatgtgtgcgagtgggcaaggataatttctctaccaacgttgtacttgccaaattgttgcagctgccactatcgatgatgatgcgaatcgaccgttcgtgcacgacgcccttggtatggaatagagtgtgtcgctgatttttttcggcctgggcaacctgtgtgctgagaacacgctgcacaacaagactctcatacctatcggcgtcgatgggatcaacgtggacttcctcattttctgcatggttagtggcaatcatagcatgactagtttcctcagaatcactggctgaagagtactcaccattgtcacgtataagcaaggtacgcttgtttgggcagtcccgaatcatgtgcccaaaccctctgcaacgatggcactgaatatcccgtgtacgtcctgtggaagaagcggcgcctttggcagggggcgccactggcttggtcgtccctgtgcgcgatgtagtgctaggcgtagaaggtgcaggactggaaggagttgagctgtgtgttggaccccggcctgcaaaagagttagtatatgtctttgatcgtcgtccctgcacttcacgttcagctttgcaagcatattcaaacaatgtggttatatcaaaataatccttataatcaagtatatcctgaatttccctgttcaaaccaccacgaaaacgcgccatagcagcgtcatctgactcaaccaaaccacaacgaagcatacccttttgcaactcctggtaatattcctcaacagattgtgaaccttgttgaaaacgctgcattttgttaagcaaatcacgagcataataggaaggaacaaatctgtggcgcatggcagtttttaattgggtccaagtaatgacactgttaatgggaagtttttgtttatactcacgccaccaaattaaagcaaaatcagtaaatttcactaatggcagccttcacttggctattagcaggaatatcatggcatgaaaatttctgttctacctctaattcccaatcaagatatgcagcaggatcatatttaccattaaaagatggaattttaaatttaatcttagaaaataagtcattagggggatgacgaaccacacgacgtgcacgaccacggcgatctccatcgtcctgctcagtgtcaccgccgtattcttgctccatctttgtggtcaatgcatcaaggcgtgccaggatggtgtcgagtgtggtgcgagtcgccgtttgagcaaggtcaagttggttgaaacgctcggtcgtcgaagtgatcgttgaatcaagtcgttcatgcatcgtcctaatgtcagcagcaagtccatcaacttgtccccttacttcctgcaactgggcatccaccatgtcgtgtgctcctgccatagttagcgcaaacaccaaaaggagaaaaaccaacgacaaaaacaggggtgtactgctcacaaggcgctcacactagtgctgttatcaagttcttatccgttcttaccaagccacagtggtgaaccgcaatcaacaggtggaaccggtgaaagattggatgagcgattgcgtggagaaacagaaacctgctcgtcgtagaaatatgtggagttgtgggtaggttgcactcaagtcaaggattagcacgatcaaacaataatgcaaagttgaattatagtgcaaaacacgaaactatattgctggccacaggtgcaaaagatggatatgactagtaga

SEQ ID NO: 631 - DNA, 3634 bp, Zea mays
  source (0)...(0): Zea mays BAC clone full insert sequence contig bacm.pk108.h15-2.fis28
tacaagcactgaacatgtgagccataattcctcttttgcatctgctctacatgttgatcaagaacacaaaataatgaaaccagctgttgtttttccatcatcacaagaagaattgattgctgacacttgtgatagtgaagatttgtgggataatgattcacatgtactaagacaacaactagtaaatgaacatgttacatctattattgaaccaaacattttggctaaaaaggaacatgtaatttgtattgcaaacaaaactgaagaaacaaatttgctctcttctttaaatacttggggctatattgaatttgatgatctttttgagctcggtaatttggaaaatattttatttgctaaatcaactataccatgtccttctcatgatatattttatattgctggcaagtacaacaacataggacaatttcttgtgcatagaatttctatttcatctagatatgttgtttcttcactttgtgcaaataaggtattggtatgttctcaagaagaaaagaatctcttgtttccatgtactttagttgaagtttcaggtttatatttgaaagacattaataaaagcttagtcatcaacatcaatcatgatgcaaaaccgaggacggtttgctatcaagaaggggagaatgatgagaacataacccacacagatatgaccatgttaatggctcctgctacaaagacattgaggaacaaagaagttgactggggaccaagtaatgatatttccaacatttccaacaaagcaagcacatcatcaaatttaaagatatacttgggtgaggagcatacactagagtcgaggacgactctattacaagaaggggaggatgatgaggacatcactgccatcaatacaccacaccagcgacctccttcaccatttaataatggaccagtgaaacgagtccgtgcacgtaaatttaattatcaggtgaactcgttccttgttgttgaagctaatcgttccttaaatgaggtactaataccttgtgattactttattattctaaggtgtttgggaggtgaaccatctagaatttgagaaggcaacaaggcaataaaagctgctccacttgaggggatttcgaaactacaacaagtgcaagtttaagagggcatatctttcagctcccaaggttgtttaatgcaaataagcacttgttggaaaggtctctttgtctactttctagtggatcaagaatcaacgagagatcagacactaagtgtccagaaactgccgagttaactcctgctctacccaagtcaatttcgtaactgcagcatgcaccaagttaaatggagcataactttccactcccaaggttgtttagtgcaaataactacttgttggaaagctctcttcgtctactttcatttgcatcaagaatcaatgacagcaaccaaacgaggcgtccagaaactgccgagagagtttcgttctccattagaactcctttctattcctctatttaagcaactagcagccaccaaagaacttgggtttttgtttgatgtaagtttagcctttgctacttccttgtaaacgcgtgtgtcggctagaccacccggatacttgaaacagaaccccaactctatcagatccgtgagcgtctgctttttatcttgttcttgcttgttctcgattgcttgcaggttcaaggctgttcttggcacggcaagagcagcaacaacaggagccggtgtaactatcgctaaggcgcagcacccttgtggttattgtagtcggatagcacaacgtcgacctccaccccaaatcgtagttatcaggagacagtgtacctgtcgctcaaggcgccacaccatcttggttgtggtagtcgggcagccaacgtcgttctccaacaagtttttcacctccatcatctctcatcaaaagatcgggcacccttctacccgttgggtttatcaagtggtatcaaatttcaggttgctcggtgagagaactcaatctttctttgttttatttacctacagtccacttttgcccaaagatatatttagatcagaaattcacctaaaaacagtttgagcctttgctttactatttagttttcgacttgttgaattcacggttgctgcatttgggtcgagttgctggtctaaagttttcttaccgctagagtttcgagttcgcgccaccttgtttcaatcaccagtttagacctcttgctgcaattcaaccaaaaagaagagaaagcaaaaggcgagtgcataaaaaaagccgcactaatcagcaaaacaaaaaaaagacacgtgcaaaaaaagagagagaaaaaccagttctgaattttggtagataaaatttgtaagtgcaacaaaacaaaaggcagtttgtgtgccttctttttatagtttcagaaatcagattgttgttctgagcttttggtgatactatttgtgtaacggctcgcgtctctattacggtttggactaggaccagcacaacaccattgtggaacgtttattcaacttgttgtggctaacgtggtactagctattccttggaactattgtttgaacagccacctataaatccacaaaattttctacaacaccaccaggttgtgctagcagccactgttgttgttgttcgtgctgtttgccagcgcctcctgctttgcgtggtgagaacttgtaagaacttgtttaaccagtttgagagtgagagattacaacaatgattcctagtagtttatagaatcaaagatattttttattgtttcttgtctttactaaacatggcaggtgatatggacatttttgacccaaccgaacgttatattggaggcatcattcaacacttgcctttatatgccggtaaattcgatcctcatgcatacattgattgggagctaaaggtagataaggaatttgataagcatgatctatctcaaaaacaaaagatttatattgcctctaatttgttaactgagcacgcattgatggaatggaaatacatttgtaggcacaacaaagttccacaatcttgggaagacttcaaacttcattttagagatgcattcattcctgcatactatgctgatcatttgctttctaaattagacaccttaaagcagggttctaggactatgaaagattattattatgattttaaaatttgtaccatgtttgctcgtttagatgaatgcatggaagatgtcatgactaggttcatgaaaggactcaattctgaaattcagactatagtcatgcatgaagcatacaaacacatttctcacttgtttttgcttgcatgtaaagctgaaaatgagattctattatacaattatacaagcactgaacatgtgagccataattcctcttttgcatctgctctacatgttgatcaagaacacaaaataatgaaaccagctgttgtttttccatcatcacaagaagaattgattgctgacacttgtgatagtgaagatttgtgggataatgattcacatgtactaagacaacaactagtaaatgaacatgttacatctattattgaaccaaacattttggctaaaaaggaacatgtaatttgtattgcaaacaaaactgaagaaacaaatttgctctcttctttaaatacttggggcta

SEQ ID NO: 632 - DNA, 3834 bp, Zea mays
  source (0)...(0): Zea mays BAC clone full insert sequence contig bacm.pk108.h15-2.fis29
caagccaaggagaagaagggacatgcaaaggcatatacaaaccatggttgttcaaccgtgacttagctttctgacaagtagtgcagcgtgcaacaaggcgctcaacatcagcgcgcatccgaggccaaaataagtgggcagccaacacctcatgtgttttgtagacgccaaaatgccccatgagaccgcctccatgtgcctcctgtaacaacaaaagacgaaccgaactagctggaacacacagcttattagcgcgaaacaggaacccatcctgtatgtgaaatttgccccatggtatcccattaatacaatggccgaaagcatctttaaaatcagcatcgtcaacatattgatccttcagagtgtccaaaccaaagattttaaaatctaattgtgacagcatggtatagcgacgagacaaagcatcagcaataacattgtccttcccgttcttgtgtttaataatgtaaggaaaggactcaatgaattcgacccatttagcatgacgacggttcagatttgtttgggtacgaatatgttttaaagcctcatgatcagaatgaattatgaactcacgatgccaaagatagtgctgccatgtatgcaaagtgcgcactaaagcgtaaagctccttatcataagtagaatatttcagactagcaccgcttaatttttcactaaaataagcaactggttttccttcttgtaacaaaacagcacctagcccaataccgctagcatcgcattcaagctcaaaaactttattaaaatcaggcaattgcaagaggggagcttgggttaacttatctttcaaagtgctgaacgctacctcctgcgaatcactccaagcaaacggcacatctttctttgtaagctcatgtagaggcgctgcaatggagctaaaatcacgaacaaatctgcggtagaaaccggcaagtccaagaaagctccgaatctgtgtgaccgtcgtcggtgtaggccactcccgaatggcagcaatcttgctgctatccacctcaatgccctgcggagtaaccacataaccaagaaacgagacacgttgcgtgcaaaatgtgcacttttccatgttaccaaacaagcgagcagcacgcaaagcatcaaaaacagcacgcaaatgttctaaatgctcctctatagacttgctgtaaataaggatatcatcgaaataaacaacaacaaacaaacctatgaaggcccatagaacttcgttcattaaacgcataaaggtgctgggagcattagtcaatccaaatggcataaccaaccattcatataaaccaaatttcgttttaaaagccgttttccattcatcaccgagtttcattctaatctgatggtaaccgctacgcaaatcaaccttagagaaaataacggcaccactaagctcatctaacatatcatcaaggcgtggaataggatatcgataacgaactgtgatgttattaatagcacgacaatctacgcacatacaccatgacccatcttactttggaacgagtaaaacaggaaccgagcaagggctaagagactcacgaatgtaatccttatcaagcagcgtctgcacctggtgctggatctccttcgtctcctctggatttgtacggtacggggcgcggttcggaagagaagcgccggggatgagatcgatctgatgctcaatgccacggaggggaggaagacccggtggtaagtccgtaggataaacatcagcatactcctgcaaaaggttaacaacagcagggggtatatccaaagacggtgcatcatcaagcggaacaagcatgcgcgagcatacaagtgcataacagggcatatgagcttcatggagatcatcaaaatcatccacactactgatgcatctataccaatacaagtaccaatttctggtcccattactcgcgctcgtgctcgtcaactcaaccatcaggtgattacactcttgagttcatgtccatcatatttagaccatggagacccgtgcactcttgttttgcttaggaatcagggagaagactgaaagggaaaaggatttgaacatgctggattcggactacagaagaacaccaacttgtgacggtcaccacggtcagatgcgggctcggattggaatgttcaagcacaacatggaaagcttatcaagtctactttcatatggatccggaattatagtcatatctgttctgaggccgccgtaatcattgttttcttaccgagacatttcctgccttttctgcccatggtgctgcgtcaccctattttggcccaatgggtcgtgtatcaagttaggtccattagggacgcatcctagggttgcagcacgaccccaatacccttgtggtcgtcctcccatgtttataaaccccctagccgccaccaagaacggcgggttttgtttagatcaagtttagctctcgctacttgcttgtaagcgcgcgtgctagtcagccgcccgtcttcttgtcttcggaaccccaccatattgtagtttgatctttaaacctacatttagatctggtaattcagtacttgttctacttgttcttgctagttcttcgattgcttgcaggacgagtgccctagtggccagggtgtcacgctccacaagatcgtgacagccataggaggtggtgtatcggttgctaaggcgcagcgtctttggaaggctgtagtcgggccgtgaacgtcgtctcctcccccaatcgagttattccacaccctctcatcgaaagatcgggcaatcacccaacgggtgcacatcagttggtaatcagagcaaggtttatcggtgagagatttacttttcttcgctgttttcttatctcctatagtccagaaaaagccaaaaaatagtagattagttttaccgcaatcctataaaccattgagcatttactagtactacttagttagggcttgttgagtttttggttgcatcggttgtgtcgagttgctggtcttagtttattcctttagagttttgagttctaccacgttttggtcaccacgagatccaccatcaccaaaaacatctctggttcgtttttgccaccacggatacatatcatatccgatttggaagtttaaatacaatctggaaagcttatcttatcttctttccaacggatctgaccttatctcaaaattcgttctgagcgctccgcaatcatcgtagagatttctggactttctatattaacaagatttgttaaatctgatttaaaggggctgttagcaatatctttattgtttgggttgtcatagtgaaaaaagggtttaagcccctgcaaaaaaaaaaacagaagaagaagaagaaaaaaaaagaatagaaaaaaaaggaaaagaagaagaagggggctgaatctctaaatctgttgtttctctttgtgctgtgctagttgttctttttcagtgactacctttgtgcctaggctcacgtctctaacctggtttagcctaggaccagcacagtaccaccgttgaacgattattcagcttgcttttgtaactaacgtggtactagtgtattccttgcttcagcccacctacaactctacatatttcgactacagtttgacaggtcgtgttgctgcggcaccgatacacttattccacggttgcagacttgttggttgctgacccctcctgttgtgcaaggtaagaattggtaagagcttgtgtggcaggttgagagtgagcgccttgcagtagctacatcctaatagttgtagagtttttattccttcacgtttttttttcttgttgcctctgttcgtctaaccatggcaggattggaggttgatgatgcttctcgta

SEQ ID NO: 633 - DNA, 4161 bp, Zea mays
  source (0)...(0): Zea mays BAC clone full insert sequence contig bacm.pk108.h15-2.fis30
taataatgtaggaaaaagactcaatgaattcgacccatttagcatgacgacggttcagatttgtttgggtacgaatatgttttaaagcctcatgatcagaatgaattatgaactcacgatgccaaagatagtgctgccatgtatgtaaagtgcgcactaacgcgtaaagctccttatcataagtagaatatttcagactagcaccgcttaatttttcactaaaataagcaactggttttccttcttgtaataaaacagcacctagcccaataccgctagcatcgcattcaagctcaaatactgtattaaaatcaggcaattgcaataggggagcttgggttaacttatctttcaaagtgctgaacgcttcctcctgcgaatcactccaagcaaatggcacatctttctttgtaagctcatgtagaggcgctgcaatggagctaaaatcacgaacaaatctgcggtagaaaccggcaagtccaagaaagctccgaatttgtgtgaccgtcgtcggtgtaggccactcccgaatggcagcaatcttgctgctatccacctcaatgccctgtggagtaacaacataaccaagaaacgagacacgtcgtgtgcaaaagatgcatttttccatgttagcgaataactgggcggcacgcaatgcatcaaaaacagcacttaaatgttccaaatgctctttcttagatttgctgtaaataaggatatcatcgaaataaacaaccacaaacaatcctatgaagggcctcagaacttcattcatcactcgcataaaagtgctgggagcattagtcaatccaaacggcataaccaaccattcatataaaccaaatttcgttttgaaggctgttttccattcatcacccagtttcattctaatctggtggtaaccactacgtaaaaataatggcaccactaagctcatctagcatatcatcaaggcgtggtataggatagcgataacgaatagtgatattattaatagcacgacagtctacacacatacgccatgacccatccttcttgggaacaagtaacacaggaacagagcaagggctaagagactcacgaatgtatcctttgtcaagcaacgcctgtacctggcgctgaatctccttcgtctcatccggatttgtacggtatggtgcgcggtttggaagctgtgcaccgggaatgaggtcgatctggtgctcaatgccacgaagcggtgggagacccggtggtaagtctttgggaaagacatcagcgtactcctgcaaaaggttagcaaccatagggggaatagccaaagatggtgcatcatcaagtgaaatgaggacactagagcatacaagtgcatagcatggcaaatgagcaccgtgtagatcatcaaaatcagcacgtgtagcaagtaaaacaggagccttcaacttaatttcagaaggaacagagggcgatggatcaagttgtttagcagttatagcagctcgggcaagatcatctttaacaatttgttcaggtgtcattggatgtataattattttctgacccttaaaaatgaaagaataatgattcgaacgaccatgatgcaagctatcagtatcatattgccaaggtcgaccaagtaacaaagagcatgcttccatgggaataacatcacaattaacaaaatcagaataagcacccatggagaaaggaacacgcacggaacgcgtgatttttattttaccaccatcattaagccattggatgtgatatgggtttggatgcttacgagtgggtaacgacaacttttcgaccagcatggtactcgccaaattgttgcaactgccgctgtcgataatgatgcgaattgaccgctcctgcacaacaccctttgtatggaacagagtgtgtcgctgattcttctcgggcaaagcaacctgtgtactaagaacacgctgcacaacaagactttcatacctatcagcgtcgctcgggttgacatgtacctccgcctgagctgcatggttagtggcaagtagtgcatgttcaatttctttagaatcactagcggaagagtactcaccatcgtcacgaatgagcaaagtgcgcttgtttgggcagtctcgaatcacatggccaaatcctctacagcgatgacactgaatatcccgtgtacgacctgtgggtggggtagtgctggctggtttggtcgtcttctcgcgtggagtagtggtggacgtggatggcgcagggggaactggtgctgaggtggatgtcgagcttcgtcctgcaaaagggttagaatatgtcttcgagcggcgtccctgcacttcacgttcagctttgcaagcatattcaaataaagtagtcatatcataatattccttataatcaagtatatcttggatttcgcggtttaaactgtaacaccccaggtgttgccatggctggagcacaccttggcactcaagactatgatcacatgtggaagaacttaaggagcaaaagtataaggggctttggaaactaagtttttaccaagagttgggaatgaccaaaggcattaccctaattgtgtgcaactatcaccttgggagagggggaaagaaccctaggcctctcttaaaccctatctcccaaaaccatggataagaggggaaagagagtgagcaaatgtgcaaaacatgggtaattttcacccaaaccctaagcaacattataaccatcaattaggggagggaaatattacaaaaaggcccctagggaaaccccatttcaaatctccaagtggagagagagctagagctctctaattccctctaagtcccattttagcaacaagatgtatcatgatctcagatgcaccctggatgttcccaaggaccctgagcttagaaagaagatactggacgaagctcacctttccaaattctccatgcaccctggtagcaacaagatgtatcatgatctcagatctctatattggtggactagaatgaaaagggaaattgccaaatacatatccgaatgtgacacctgccagagaattaaggctagtcacttgaaggcagcaggccatttgcaaccccttcccataccatcttggaaatgggaggacatttgcatggacttcatagtgggattacccaatacctccaggcaccatgattctatttgggttatcgtggacagattgaccaagactgctcatttcttgcccgtgcacaccacccacaagaccgagaagtatgctgagatttatgttgatcagatagtgagattgcatggtattcccaagaccattatatctgacagaggagcactgtttgtggcacgcttttgggagaaactgcaagaatcacttgggacccatgtcatccgaagctcagcataccacccacaaacagatggccagatagaaagggtgaatcaaattttggaagatatgttgcgagcctgtgcactacattatggaaaggaatgggacaagtgtctgtctttggcagagttctcttacaacaatagctatcagtccagtctgaagatggcaccttttgaggcattgtatgggagaaggtgtaggaccccactgaattggtctcaagcaggagaaagggaaatttttgggccagacttagtactcgaggcagaggcaaaggtcagggtcattaccaagaacttggaagctgctcaggctaggcaaaggagctatcatgataagaggcggaaacctctacagtttgaggtgggagatcatgtctatcttaaggtatcccccaccaagggtgttcagagattcgggatcaagggcaagttagcccctcgctacattggaccctatgagatcaaggcaagttgtggacccgtagcttaccaattggaattgccacctcacatgtcagcagtgcataatgtgttccatgtatctcagctacggaaatgtgttcgtctacccactgaagtactcccggaaccagacattgagatagaaccagatttatcctaccaagagtaccccgtcaaggtattagatcaaaaggagagatcaactcgggcaaggacagtaagaatgtatatgttcagtggagtcaccattcaacagaagaagctacatgggagactgaggattttctacgctctcgcttccccgactttctacccaaagagtcggtatgtaaccacagg

SEQ ID NO: 634 - DNA, 5979 bp, Zea mays
  source (0)...(0): Zea mays BAC clone full insert sequence contig bacm.pk108.h15-2.fis31
ctcgtttggttgctgtcattgattcttgatgcaaatgaaagtagacgaagagagctttccaacaagtagttatttgcactaaacaaccttgggagtggaaagttatgctccatttaacttggtgcatgctgcagttacgaaattgacttgggtagagcaggagttaactcggcagtttctggacacttagtgtctgatctctcgttgattcttgatccactagaaagtagacaaagagacctttccaacaagtgcttatttgcattaaacaaccttgggagctgaaagatatgccctcttaaacttgcacttgttgtagtttcgaaatcccctcaagtggagcagcttttattgccttgttgccttctcaaattctagatggttcacctcccaaacaccttagaataataaagtaatcacaaggtattagtacctcatttaaggaacgattagcttcaacaacaaggaacgagttcacctgataattaaatttacgtgcacggactcgtttcactggtccattattaaatggtgaaggaggtcgctggtgtggtgtattgatggcagtgatgtcctcatcaggagggatagcatttttgtggttgttgatcgattctccaaaatggctcatttcatactttgtcataagaccgatgatgctagcaatgttgctgaattgtttttagagagattattcgtttgcacggtattcccaatacaatagtctcggatcgtgatgctaagtttcttagtcatttttggagatctctgtggaataaattgggaactaaattgctgtttagcaccacttgtcaccctcagactgatggtcaaactgaggtagttaatcaaactttgtctaccatgcttagggctgttttagacaaaaatttgaaacgttgggaggattgcttgcctcatgttgagtttgcttataatcatgcaacacattcttctacaaagatgtgcccttttcaaattgtttatggttacattcctagggcgcctattgctttgttttcgcttgatgctgcggacgccccacacatagatgctattgcacatgttgaacaaatgattaacctccatgaacaaactcaacaaaacattgctgctactaatgcaaaaaatcaggttgctggtagtaaaggaagaaaacttgttacttttgagccaggtgatatggtttggttgcacttgagaaaggatcagtttcctactttgcgccgttctaaattaatgcctcgtgctgctggtcctattaaggtgctaacaaagattaataataatgcttatatccttgacctgcctgcggaatttggtgtttccactagttttaatgttgcagatttgaaaccatatatggccgaggatgaggagttgccgtcgaggacgacttcacttcaagaaggagaggatgatgaggacatcactatgagtacgactacaccagcagcacctccacatcaagcgccacttccttcattagctgggccaatcactcgggcccgtgccagagatcttaacttcgtcatgctactgaagaatgaaggtccagaagaatagacgaccagcccaactgcggcccatagtggacgacctagggttggccgcccctaggggctgtgccccctctctctatttatataggagttgcgcctcctttgttttttcgagttttgttttacatctagctttagctaccccagaacacgcacaaatacgtgttgtcctctgtgattcagaactccacctcgagtgatattaagattgctcgcatctttttcttgttcgttcttcgattgcgcacaggaaaggatcttcgtgatcaggccgatctcgcatcagcaaggtcggtaaccattggaagttggttcagcgattgcattggcgcttcgggatcgctcgtcgtagtcggatcgtgagggtctacttccaccaaatcggaattatctccactcaccgaaagatcgggcactccagttctatcacattgccgcacgtcacccattccgaaaacgggtgtcgaagtgcatacaataacgaatttttgccaccggaaccatttcttcgtttttcgcaacgaacatgcccaatccactactttaggtccaaaacacatgtttggagtggtttcgcgcaatttcattgccgcacgtcacccattccgaaaacgggtgtcggggtgcatacaagcacgagtttttgccaccggaaccatttcttcgtttttcgcaactaacacgtccaatccactactttaggtccaaaactcatgtttggggtggtttcgcgcaatttcgttgccgcacgtcactcattccgaaaatgggtgtcagagtgcatacaaagcacgagtttttgccaccggaaccatattttcgtttttcccaatgaacatgcccaatccactactttaagtccaaaacgcatgtttggggtggtttcgcgcgatttcattgccgcacgtcatccattccgaaaacgggtgtcggggtgcatacaagcacgagtttttgccaccggaaccatttcttcgttttttgcaacgaacatgccgaatccactactttaggtccaaaactcatatttgaggtggtttcgcgcaatttcattgcggcacgtcactcattccgaaaatgggtgtcgaggtgcatacaagcacgagtttttgccaccggaaccatttcttcatttttcgcaacgaacatgcccaatccactactttaggtccaaaactcatgtttggggtggtttcacgcaatttcattgccgcacgtcactcattccgaaaataggtgtcgaggtgcatacaagcaagagtttttgccaccggaactatttcttcgtttttcgcaaccaacatgcccaatccactactttaggtccaaaactcatatttggggtggtttcgcgtaatttcattgccgcacgtcacccattccaaaaacgggtgtcgaggttcatacaagcacgagtttttgccaccggaaccatttcttcgttttttgcaacgaacatgcccaatccactactttagttccaaaactcatatttggggtggtttcgcgcaatttcattgccgcacgtcactcattccgaaaacgggtgtcgaggtgcatacaagcaagagtttttgccaccggaaccatttcttcgtttttcgcaaccaacatgcccaatccactactttaggtccaaaactcatgtttggggtggtttcgcgcaatttcattgccgcacgtcacccattccgaaaacgggtgtcggggtgcatacaagcacgagtttttgccaccggaaccatttcttcgttttttcccaaccaacatgcccaatccactactttaggtccaaaacccaggtttggggtggtttcccccaatttctttgacccacgtcacccattccaaaaatgggtgtcggagtgcatacaaaccaaaattttttcccccgaaaacattattttcttttttccaaaaaaatatgccaaacccactactttaggtccaaaactcatgtttggggtggtttcacgcgatttcattgccgcatgtcacccattccgaaaacgggtgtcggggtgcatacaagcacgagtttttgccaccggaaccatttcttcgtttttcgcaacgaacatgccctccactactttaggtccaaaactcatgtttggggtggtttcgcgcaatttcattgccgcacgtcacccattccaaaaacgggagtcgaggtgcatacaaagcacgagtttttgccaccggaaccatttcttcgttttttgcaacgaacatgcccaaaccactactttaggtccaaaactcatgtttggggtggtttcgcgcaatttcgttgccgcacgtcactcattcagaaaacgggtgtcggggtgcatacaaagcacgagtttttgccaccggaaccatttcttcgttttcccatcgaacatgcgcaatccactactttaggtccaaaacacatgtttggggtcatttcacacaatttcgttgccgcacgtcacccattccgaaaacgggtgtcggggtgcatagaagcacgagtttttgccacgggaaccatttcttcgtttttcgcaacgaacatgcccaatccactactttaggtccaaaacacatgtttggagtggtttcgtgcaatttcattgccgcacgtcacccgttccgaaaacgggtgtcggggtgcatacaaagcacgagtttttgccaccggaaccatttctttgtttttcacaacgaacatgcccaatccactactttagatccaaaacacatgtttggggtggtttcacgcaatttcgttgccgcacgtcacccattccgaagacgggtgtcgggggtgcatacaagcacgagtttttgccaccggaaccatttcttcgtttttcgcaatgaacatgcccaatccactactttaggtccaaaactcatgtttggggtggtttcgcgcaatttcgttgccgcacgtcactcattccgaaaacgggtgtcggggtgcatacaaagcacgagtttttgccaccggaaccatattttcgtttttttcccaacgaacatgcccaatccactactttaggtccaaaacgcttgtttggggtggtttcacacaatttcgttgcagcacgtcacccattctgaaaacaggtgtcggggtgcatacaagcaccagtttttgccaccggaaccatttcttcgtttttcgcaacgaacatgccgaatccactattttaggtccaaaacacatgtttgggttggtttcgcgcaattttattgccgcacgtaaccaattccgaaaacgggtgtcgggttgcatacaagcacgagtttttgccaccggaaccatttcttcgtttttcgcaacgaacatgcccaatccactactttaggtccaaaacacatgtttggggtagtttcgcgcgatttcattcccgcacgtcacccattccgaaaacgggtgtcggggtgcatacaagcacgagtttttgccaccggaaccatttcttcgtttttcgcaacgaacatgcccaatccactactttaggtccaaaactcatgtttgcggtggtttcgcgcaatttcattgccgtacgtgacccattccgaaaacgggtgtcgggtgcatacaagcacgagtttttgccaccggaaacatttcttcgtttttcgcaacgaacatgccgaatccactactttaggtccaaaacacatgttttgggtggtgtcgcacaattttattgcagcggtttcgcgtgatttcattgtcgcacgtcacccattccgaaaacgggtgtctgggtgcatacaagcacgagtttttgccaccggaaccatttcttcgtttttcgcaacgaacataaccaatccactactgtaggtccaaaacacatgtttggggtggtttcgcgcaatttcattgccgcacgtcacgcataccgaaaatgggtgtcggggtgcatacaaagcacgagtttttgtcactggaaacatttccttcgtttttcgcaacgaacatgcccaatccactactttaggtccaaaacacatgtttggggtggtttcgcgcaatttcattgccgcacgtcacccattccgaaaacgggtgtcggggtgcatacaagcacgagtttttgccaccggaaccatttcttcgtttttcgcaacgaacatgcccaatccactactttaggtccaaaacacatgtttggagtggtttcgcgcaatttcaatgccgcacgtcacccattccgaaaacgggtgtcggggtgcatacaaagcacgagtttttgccaccggaaccacaagaaggaaaaccagttgcttattttagtgaaaaattaagcggtgctagtctgaaatattctacttatgataaggagctttacgctttagtgcgcactttgcatacatggcagcactatctttggcatcacgagttcataattcattctgatcatgaggc

SEQ ID NO: 635 - DNA, 3051 bp, Zea mays
  source (0)...(0): Zea mays BAC clone full insert sequence contig bacm.pk108.h15-2.fis32
ggtggtttcgctcaatttcgttgccacacgtcccccattccgaaaacgggtgtcggggtgcatacaagcacgagtttttgccaccggaaccatttcatcgtttttcgcaatgaacatggccaatccactactttaggtccaaaactcatgtttggggtggtttcgcgcaatttcgttgccgcacgtcactcattccgaaaacgggtgtcggggtgcatacaaagcaggagtttttgccaccggaaccatttcttagtttttcccaacgaacatgcccaatccactactttaggtccaaaacacatgtttggggggggtggtttcccactattttgttgccgcacgtcacctttaaaaaaaggggtggggggttgcatacaaagcatgagttttttccaccggaactatttcttcgtatttcgcaacgaacatgcgcaatccactactttaggtccaaaactcatgtttggggtggtttcgcgcaatttcattgtcgcacgtcacccattccgaaaacgggtgtcgggggtgcatacaaagcacgagtttttgccaacggaaccatttcttcgtttttcgcaacgaacatgcccaatccactactttaggtccaaaactcatgtttggggtggtttcgcgcaatttcattgccgcacgtcactcattccgaaaacgggtgtcggggtgcatacaaagcacgagtttttgccaccggaaccatttcttcgtttttcgcaacgaacatgcccaatccactattttaggtccaaaacacctgtttgcgttggtttcgcgcaattttattgccgcacgtcacccattccgaaaacgggtgtcggggtgcatacaagcacgagtttttgccaccggaaccatttcttcatttttcgcaacgaacatgcccaatccactactttaggtccaaaacacatgtttggagtggtttcgcacaatttcattatcgcacgtcacccattccgaaaatgggtgtcggggtgcatacaaatcacgagtttttgccaccggaaccatttcttcgtttttcataacaaacatgcccaatccactactttaggtccaaaacacatgtttggggtggtttcgcgcaatttcattgccgcacgtcacccattccgaaaacgggtgtcggggtgcatacaagcacgagtttttgccaccggaaccatttcttcgtttttcgcaacgaacatgcccaatccactactttaggtccaaaacacatgtttggagtggtttcgcgcaatttcaatgccgcacgtcacccattccgaaaacgggtgtcggggtgcatacaaagcacgagtttttgccaccggaaccacaagaaggaaaaccagttgcttattttagtgaaaaattaagcggtgctagtctgaaatattctacttatgataaggagctttacgctttagtgcgcactttgcatacatggcagcactatctttggcatcacgagttcataattcattctgatcatgaggctttaaaacatattcgtacccaaacaaatctgaaccgtcgtcatgctaaatgggtagaattcattgagtcttttccttacattattaaacacaaaaacgggaaggacaatgttattgctgatgctttgtctcgttgctataccatgctgtcacatttcgattttaaaatctttggtgtgcacactgtgaaagatcaatatgttgacgatgctgattttaaagatgctttcggtcattgtattaatgggaaaccatggggcaaatttcacatacaggatgggttcctgtttcgcgctaacaagctgtgtgttccagctagctcggttcgtcttttgttgttacaggaagcgcatggaggcggtctcatggggcactttggcgtctacaagacacatgaggtgttggctgcccacttcttttggcctcggatgcgcgctgatgttgagcgccttgttgcacgctgcactacttgtcagaaagctaagtcacggttgaacaaccatggtttgtatatgcctttgcctgttcctacttccccttggattgatatttcgatggattttgttttgggattgcctagaactaagaaggggaggtgataaacccaacgggtagaagggtgcccgatctttcgatgagagatgatggaggtgaaaaatttgttggagaacgacgttggctgcccgactaccacaaccaagatggtgtggcgccttgagcgacaggtacaccgtctcctgataactacgatttggggtggaggtcgacgttgtgctatccgactacaataaccacaagggtgttgcgccttagcgatagttacaccggctcctgttgttgctgctcttgccgtgccaagaacagccttgaacctgcaagcaatcgagaacaagcaagaacaagataaaaagcagacgctcacggatctgatagagttggggttctgtttcaagtatccgggtggtctagccgacacacgcgtttacaaggaagtagcaaaggctaaacttacatcaaacaaaaacccaagttctttggtggctgctagttgcttaaatagaggaatagaaaggagttctaatggagaacgaaactctctcggcagtttctggacgcctcgtttggttgctgtcattgattcttgatgcaaatgaaagtagacgaagagagctttccaacaagtagttatttgcactaaacaaccttgggagtggaaagttatgctccatttaacttggtgcatgctgcagttacgaaattgacttgggtagagcaggagttaactcggcagtttctggacacttagtgtctgatctctcgttgattcttgatccactagaaagtagacaaagagacctttccaacaagtgcttatttacattaaacaaccttgggagctgaaagatatgccctcttaaacttgcacttgttgtagtttcgaaatcccctcaagtggagcagcttttattgccttgttgccttctcaaattctagatggttcacctcccaaacaccttagaataataaagtaatcacaaggtattagtcc

SEQ ID NO: 636 - DNA, 4801 bp, Zea mays
  source (0)...(0): Zea mays BAC clone full insert sequence contig bacm.pk108.h15-2.fis33
gacgttaccctagatggagacgaagggagctttccaacaagtatttatatgcattaaacggccttggaagtttgaagatatgccccatttaaacttgtacttggtgctgttacgaaatcctttcgggtgcagcagcctttattgtcttgttgccttctccagtccaagatggttcacctcccaaacacttgagcataataaagtcatcgcaaggctttagtacctcatttaaagaagaattagcttcaatagcaaggaacgagtttatctgataattaagtttacgtgcacaggctcgtgtcattggtccttgattagctacgaatggtgaagtggtcactggtatggttgtatcaatgatagtgatgtcctcatcatcctccccttcttgcaacaaagtcgtcctcgactcaaacgtgtcattctctcccaagtatggtgttaaatctgcaatattaaaagaggaactgaccccaaaatctgcaggcaactgaactttatatgcattatcattatttttgtgaagtactttgatgggtctagcagctcttggttgtaatttagatttgcgcatatcagggaatctatctgatgtagctgaggtgcccgatcttttggcgagtagagataattccgatttggcggaagatgacccttgcgatccgactacgacgagcaagcccgaggcgccaatgcaatcgctgaaccaactctctgtggttaccgaccttgctgatgcgagatcgacctgatcacgaagatcgtttcctgtgcgcaatcgaagaacgaacaagaaaaatatgcgagcaatctaatctattactcgagggtggagttctgaatacacgaagacaacgcagatttgcacgtgttcgagagtagctaaggctaacgtaaaacaaaactcgaaaataaaggaggcgcagctcctggataaatagagggggcgcagcccctaggggcggccaaccctaggtcgtccactatgggccgcagttgggctggtcgtctattcttctgggccctcattcttcagtagcatgacgaagttaagatctctggcacgggcccgagtgattggcccagcttatgaaggaagtggcgcttgatgtggaggtgctgctggtgtagtcgtactcatagtgatgtcctcatcatcctccccttcttgaagtgaagtcgtcctcgacgacaactcctcatcctcggccatataaggtttcaaatctgcaacattaaaactagtggaaacaccaaattccgcaggcaggtcaaggatataagcattatcattaatctttgttagcaccttaaaaggaccagcagcacgaggccttaatttagaacggcgcaaagtaggaaaccgatcctttctcaagtgcaaccgaaccatatcacctggctcaaaagtaacatgttttcttcctttactaccagcaacctgattttttgcattagtagcagcaatgttctgtttcgtttgttcatgtatggtaatcatttgttcaacatgtgcagcagcatctacatgtggggcgttcgcagcattaagtgaaatcaaatcaataggtgccctagggatgtaacaataaacaatctgtaaagggcacatctttgtagaagaatgcgtggcatgattgtaagcaaattcaacatgaggcaagcaatcctcccaacgtctcaaattcttgtctaaaacagccctaagcatggtagataaagttctatttactacctcagtttgtccatcagtctgaggatgacaagtagtgctaaacaacaatttagttcccaatttattccaaagagatctccaaaaatggcttagaaacttagcatcgcgatcagagactattgtttttggaataccatgtaaacgaataatttctctaaagaacaattcaacaacaatgctagcatcatcagttttatgacaaggtataaagtgagccattttagagaatctatcaacaaccacaaaaatactatccctccccttcttagttctaggcaagcccaaaacaaagtccatagagatatcaagccaaggagaagaagggacaggcaaaggcatatacaaaccatggttgttcaaccgtgacttagctttctgacaagtagtgcagcgtgcaacaaggcgctcaacatcagcgcgcatccgaggccaaaagaagtgggcagccaacacctcatgcgttttgtagacgccaaaatgccccatgagaccgcctccatgcgcctcctgtaacaacaaaagacgaaccgaactagctggaacacacagcttgttagcgcgaaacaggaacccatcctgtatgtgaaatttgccccatggtatcccattaatacaatggccgaaagcatctttaaaatcagcatcgtcaacatattgatccttcacagtgtccaaaccaaagattttaaaatctaattgtgacagcatggtatagcgacgagacaaagcatcagcaataacattgtccttcccgttcttgtgtttaataatgtaaggaaaggactcaatgaattcgacccatttagcatgacgacggttcagatttgtttgggtacgaatatgttttaaagcctcatgatcagaatgaattatgaactcacgatgccaaagatagtgctgccatgtatgcaaagtgcgcactaaagcgtaaagctccttatcataagtagaatatttcagactagcaccgcttaatttttcactaaaataagcaactggttttccttcttgtaacaaaacagcacctagcccaataccgctagcatcgcattcaagctcaaaaactttattaaaatcaggcaattgcaagaggggagcttgggttaacttatctttcaaagtggtgaacgctacctcctgcgaatcactccaagcaaacggcacatctttctttgtaagctcatgtagaggcgctgcaatggagctaaaatcacgaacaaatctgcggtagaaaccagcaagtccaagaaagctccgaatttgtgtgaccgtcgtcggtgtaggccactctcgaatggcagcaatcttgctgctatccacctcaatgccctgtggagtaaccacataaccaagaaacgagacacgttgcgtgcaaaatgtgcacttttccatgttaccaaacaagcgagcaaatgttctaaatgctcctctatagacttgctgtaaataaggatatcatcgaaataaacaacaacaaacaaacctatgaaggcccgtagaacttcgttcattaaacgcataaaggtgctgggagcattagtcaatccaaatggcataaccaaccattcatataaaccaaatttcgttttaaaagccgttttccattcatcaccgagtttcattctaatctgatggtaaccgctacgcaaatcaaccttagagaaaataacggcaccactaagctcatctaacatatcatcaaggcgtggaataggatatcgataacgaactgtgatgttattaatagcacgacaatctacgcacatacgccatgacccatctttctttggaacgagtaaaacaggaaccgagcaagggctaagagactcacgaatgtaacccttatcaagcagcgtctgcacctggcgctggatctccttcgtctcctctggatttgtacggtacggggcgcggttcggaagagaagcgccggggatgagatcgatctgatgctcaatgccacggaggggaggaagacccggtggtaagtccgtaggataaacatcagcatactcctgcaaaaggttaacaacagcagggggtatatccaaagacggtgcatcatcaagcggaacaagcatgcgcgagcatacaagtgcataacagggcatatgagcttcatggagatcatcaaaatcagcacgtgtagcaagtaaaacatgagagtgcaacttgatttcagatttagtaggtgcggctgatgtcgatttgacttgttgtgcagttttagcagccctagtaagatcatctttcaaaatttggtcaggggtcattggatgtataattattttctggcctttaaacatgaaagaataatgatttgaacgaccatgatgtaaactatcagtatcatattgccaaggtcgacccaataacaaagagcatgcttccataggaataacatcgcaatcagcataatcagaataagaacccagcgaaaaggggacacgtaccgaacgtgttacctttattttaccaccatcattaagccattgaatgtgatacggatgtggatgtgtgcgagtgggcaaggataatttctctaccaacgctgtacttgccaaattgttgcagctgccactatcgatgatgatgcgaatcgaccgttcgtgcacgacgcccttggtatggaatagagtgtgtcgctgatttttttcggcctgggcaacctgtgtgctgagaacacgctgcacaacaagactctcatacctatcggcgtcgatgggatcaacgtggacttcctcatttgctgcatggttagtggcaatcatagcatgactagtttcctcagaatcactagctgaagagtactcaccattgtcacgtataagcaaggtacgcttgtttgggcagtcccgaatcatatgcccaaaccctctgcaacgatggcactgaatatcccatgtacgtcctgtggaagaagcggcgcctttggcagggggtgccactggcttggtcgtccctgtgcgcgatgtagtgctaggcgtagaaggtacagggctggaaggagttgagctgtgtgttggaccccggcctgcaaaagagttagtatatgtctttattaga

SEQ ID NO: 637 - DNA, 5770 bp, Zea mays
  source (0)...(0): Zea mays BAC clone full insert sequence contig bacm.pk108.h15-2.fis34
  misc_feature (1)...(5770): n = A,T,C or G
atccacttatgataaagatttatatgctttagttcgaactttggaaacatggcaacactacttatggcctaaagaatttgttatacattctgatcatgaatctttgaaacatctaaggagacaaacaaatctgaaccgtaggcatgccaagtgggtcgaatttattgaatcttttccctatgtgatcaaacataagaaaggaaaagataatgtcattgcggatgctttgtctcgtcggtacaccatgttgtcccaactagattttaagatttttggcttggagacaattaaacaacaatatgctttcgatgctgatttcaaagatgtgcttttacaatgtaaagaaggaaggacatggaacaaatttgttctcaccgatggctttgtgtttcgggctaacaaattatgcattccagcttgttctgtgcgtatattattattacaggaagcacatggaggtgggttgatgggacattttggtgtgaagaagacagaagacatattagcgagccatttcttttggccaaagatgagaagagacgtggagcgatttgttgctcgctgcaccacttgtctcgttgcgaaaaacgaagaaatggttccggtgacaaaaactcgtgctttgtatgcaccccgacacccgttttcggaatgggtgacgtgtggcaacgaaattgcgcgaaaccaccccaaacatgagttttggacctaaagtagtggattgggcatgttctttgcaaaaaacgaagaaatggttccgttggcaaaaactcgtgctttgtatgcaccccgacacccgttttcggaatgggtgacgtgtggcaacgaaattgcgcgaaaccaccccaaacatgagttttggacctaaagtagaggattgggcatgttcgttgcgaaaaacgaagaaatggttccggtggcaaaaactcgtgctttggatgcaccccgacacccgttttcggaatgagtgacttgcggcaacgaaattgccctaaaccaccccaaacatgagttttggacctaaagtagtggattgggcatgttcgttgtgaaaaacgaagaaatggttccggtggcaaaaactcgtgctttgtatgcaccccgacacccgttttcggaatgagtgacgtgcggcaacgaaattgcgcgaaaccaccccaaacatgagttttggacctaaagtagtggattgggcatgttcgttgcgaaaaacgaagaaatggttccgttggcaaaaactcgtgctttgtatgcaccccgacacccgttttcggaatgggtgacgtgcggcaacaaaattgcgcgaaaccacccaaaacatgagttttggacctaaagtagaggattgggcatgttcgttgcgaaaaacgaagaaatggttccggtggcaaaaactcgtgctttgtatgcaccccgacacccgttttcggaatgagtgacgtgcggcaacgaaattgcgcgaaaccaccccaaacattagttttggacctaaagtagtggattgggcatgttcgttgcgaaaaacgaagaaatggttccggtggcaaaaactcgtgcttgtatgcaccccgacacccgttttcggaatgtgtgacgtgctgcaacgaaattgtgcgaaaccaccccaaacatgagttttggacctaaagtagtggattgggcatgttcgttgcgaaaaacgaagaaatggttccggtggcaaaaactcgtgcttgtatgcaccccgacacccgttttcggaatgggtgacgtgcggcaatgaaatcgcgcgaaaccaccccaaacatgtgttttggacctaaagtagtggattgggcatgtacgttgcgaaaaacgaagaaatggtttccggtggcaaaaactcgtgcttgtacgcaccccgacacctgttttcggaattggtgacgtgcggcaataaaattgcgcgaaaccaccccgaaacattggttttggacctaaaatagtggattgggcatgttcgttgcgaaaaacgaagaaatggttccggtggcaaaaactcgtgctttgtatacaccccgacacccgttttcggaatgggtgacgtgtggcaacgaaattgcgcgaaaccaccccaaacatgagttttggacctaaagtagtggattgggcatgttctttgcaaaaaacaaagaaatggttccgttggcaaaaactcgtgctttgtatgcaccccgacacccgttttcggaatgggtgacgtgcggcaacgaaattgcgcgaaaccaccccaaacatgagttttggacctaaagtagaggattgggcatgttcgttgcgaaaaacgaagaaatggttccggtggcaaaaactcgtgctttgtatgcaccgcgacacccgtttttggaatgagtgacgtgcggcaacgaaatggcgcgaaaccaccccaaacatgagttttggacctaaagtagtggattgggcatgttcgttgcgaaaaacgaagaaatggttccggtggcaaaaactcgtgcttgtatgcaccccgacacccgttttcggaatgggtgacgtgcggcaatgaaatcgcgcgaaaccaccccaaacatgtgttttggacctaaagtagtggattgggcatgttcgttgcgaaaaacgaagaaatggttccggtggcaaaaactcgtgcttgtatgcaccccgacacctgttttcggaattggttacgtgcggcaataaaattgcgcgaaaccacccgaaacattggttttggacctaaaataatggattgggcatgttcgttgcgaaaaacgaagaaatggttccggtggcaaaaactcgtgcttgtatgcaccccgacacccgttttcggaatgtgtgacgtgctgcaacgaaattgtgcgaaaccaccccaaacatgagttttggacctaaagtagtggattgggcatgttcgttgcgaaaaacgaagaaatggttccggtggcaaaaactcgtgcttgtatgcaccccgacacccgttttcggaatgagtgacgtgcggcaacgaaattgcgcgaaaccatcccaaactatgagtgttggacctaaagtagtggattgggcatgttcgttgtgaaaaacgaagaaatggttcttgtggcaaaaactcgtgcttgtatgcacctgatgaggacatcactatcattgatacaaccatacgagtgaccacttcaccattcgtagctaatcaaggaccaatgacacgagcccgtgcacgtaaacttaattatcaggtgaactcgttccttgctattgaagctaattcttctttaattgaggtactaaagccttgcgatgacttttttatgctcaggtgtttgggaggtgaaccatcttggactggagaaggcaacaaggcaataaaggctgcagcacccgagaggatttcgtaacagcatcaagtacaagtttaaatggggcatatcttccaacttccaaggccgtttaatgcaaataaatacttgttggaaagctcccttcgtctacttgctggtggatcaagaattaatgggagactacacccgaggcgtccaggaactgccgagggaacttcatgactccaccagaattccttcttcctatttctctatttaagcaactagcagccaccaaagaacttgngttctgtttgatgtaagtttagcctttgctacttccttgtaaacgcgtgtgtcggctagaccacccgaatacttgaaacgggaccccaactttatcagatccatgcgtgtttgcttgttatcttgttctagcttgttctcgattgcttgcaggttcaaggctgttcttggcacggcaagagcagcaacaacaggagccggtgtaactatcgctaaggcgcagcacccttgtggttgttgtagtcggatagcacaacgtcgacctccaccccaaatcgtagttatcaggagacggtgtacctgtcgctcaaggcgccacaccatcttggttgtggtagtcgggcagccaacgttgttctccaacaagtttttccacctccatcatctctcatcgaaagatcgggcacccttctacccgttgggttcatcaagtggtaccaaatttcaggttgctcggtgagagatctccatcttccttattttatttacctacagtccacttttgccaaagatatatttagagcagaaaatcacctagaaacattttgagcctttgctgtactacttagttttcgacttgttgaattcacggttgctgcatttgtgtcgagttgctggtccaaagtttcttgctgcagagtttcgagttcgtgccaccttgtttagatctccatctttagttctctagctgttctctagctgtagttcaaaaaaaacaaggaaaaggaaaaggcaagtgcacaaaaaaagtcgtgctgataaaaaagcacgtacaaaaaagagaaaaaaatcacagtaagaatattggtagataaaattccatgtgcaacaaaacaaagacagtttgtgtgccaccgtttcacaattttctaagtcagcttgctgttttgagtatttggtgatatcatttgtgtaacggctcgcgtctctattatggtttggactaggaccagcacaacaccattgtggaacgtttattcaacttgttgtggctaatgtggtactagctattccttggaactatagttttagcagccactgttgtgctagcagccaccaggttgtgctagcagccactgttgttgttcttgctgtttgccagcgccactttctttgcgtggtgagaacttgtaagagcttgatttcttcctagtgaggcagtgtttatccatccacatcatagcaactactaggctgcattacttgtttttgtatctcttttgcactaaccatggcagaggatgcaaatgcgcgacctccacattctccacgaaccgtgggcatcatacaacatttcgaacgtcaagtaaggttgcacacagatgccctcaacgaagatgttcaagtcaccaatgagcgcattggtcaattagaaacaacacaaattgttaccaacaacacattgaccactttggaacgaacagttgctgctactaacacctctcttgcagcaattattgagcgcttagataggatggaccaagttgggcgtgaaggtaggcaacaaggtgatgatgatgccatggttccattactggtaccgcaagagatgatgctacggagtattcagcagacaccgagcgtgatgaccgatctattaggcactgacgacaccaacgacgtgatcgccatggcttgggtggtcgacctccacgacgtgaggtacatgaaaatgatgattctctaggaagaattaaattctccataccaccgtttgctggaaaatatgatcctgatgcatatctaacatgggaattgtcggtagatcaaaaatttgcatgctatgatttttctgaagataaaaaggttagagctgctacgagtgaattcactgattttgcttctatttggtggcatgagtaccaaactacacatccagctaccataccacaaacttggaatgctttaaaaagaatcatgcgtagtcgttttgttccttcctatcatgctcgtgatttattacataaattacaacagcttagacaaggcaacaaatctgttgaagagtattatcaacaattacaaataggcatgttgaggtgtggtctcgtagaaaatgaaaaagctgcaatggctaggttcatgggtggtttgacaagagaaatttaggatatattagcttacaaggaatacactaatgttactcgctt

SEQ ID NO: 638 - DNA, 4613 bp, Zea mays
  source (0)...(0): Zea mays BAC clone full insert sequence contig bacm.pk108.h15-2.fis35
cgatgtcgcatcgcagctttcaactgatcccaagtggttggaatggcagtggtatgtttcattttatactcacgccaccaaattaaagcaaaatcagtaaattcactaatagcagctttaacctgagaatgtgcagcaatatcatggcatgaaaatttttgttcaacctctaactcccaatcaagatatgcagcaggatcatatttgccattaaaaggtggaattttaaatttaatcttagaaaataagtcattagggggatgacgaaccacacggcgtgcacgaccacgtcgatctccgtcgtcctgctcagtgtcaccgccgtagtcctgctccatctttgtggtcaacgcatcaaggcgtgccaggatggtgtcgagtgtggtgcgagtcgccgtttgagcaaggtcaagctggttgaaacactcggtcgtcgaagtgaccgttgaatcaagccgttcatgcatcgtcctaatgtcagcagcaagtccatcaacttgtccccttacttcctgcaactgggcatccaccgtgtcgtgtgctcctgccatagttagcgcaaacaccaaaaggagaaaaaaaccaacgacaaaaacaggggtgtactgcttacaaggcgctcacactagtgctgttatcaagttcttatccgttcttaccaagccacagtggtgaactgcaagcaacaggtggaaccggtgaaagattggatgagcgattgcgtggagaaacagaaacctgctcgtcgtagaaatatgtggagttgtgggtaggctgcactcaagtcaaggattagcacgatcaaacaataatgcaaagtttaattatagtgcaaaacacgaaactatattgctggccacaggtgcaaaggatggatggaactagcagaatggcagtaccgtaaatactgtactagtgatgccaaaaaaggcactagtagaaatcacaggtgattttgtttttcttttttgtatgatttttttgatatttttctcagcacaagaagcaacaagataggagctagacgaagtttcacctaaaacagagatcagatgtggtctacagaaaatcaggaagttctctgaaaagcgtgcgagaactttgacgaatttttttctttattttcctgaatttttttgacaattttgtcgaaaccaaacagaccgaaggtgagtttggccggcctcagaatggtgtcaaatagctcctgtaaaaatttcagattttttggacacccgagcgaaaagttatgcccggtttaaggaaggtacctcaagttatgttttcaaacgaccgggatgaaacaaccatatcctttctccttcgttgttttttgtttctattttttttgacgtaaccgaaggagaaaaacaaggaaacgatgttgactcggtttgtttttttttctgtttttttttcgtaaccgaaggagaaaaacaaggaaacggccgttgactcggtttgttttttctgttttttttacgtaaccgaaggagaaaaacaaggaaacgatgttgacttagtttgtggagtgatcaaaggggagatggtggcggcgctagggtttgaatggtggaagaacacaatgcaaccagcaacaaatgacgcgaaagcacacaaattcaacaatgcagattattgaaagaaagtgcgaggctcaaaagggtgttgggataaggtctaacctgaatttttatgtggttttgtggactgtaggaaaaaaaacactcgataaactcaccgatcaacctggaaatctgataccaattgatgtagctgaggtgcccgatctttcggcgagtagagataattccgatttggcggaagatgacccttgcgatccgactacgacgagcaagcccgaggcgccaatgcaatcgctgaaccaactccctgtggttaccgaccttgctgatgcgagatcggcctgatcacgaagatcgtttcttgtgcgcaatcgaagaacgaacaagaaaaagatgcgagcaatctaatctattactcgagggtggagttctgaatacacgaagacagcgcagatttgcgcgtgttcgagagtagctaaggctaacgtaaaacaaaactcccaaaataaaggaggcgcagctcctgaataaatagagagggggcgcagcccctaggggcggccaaccctaggtcgtccattatgggccgcaattgggctggtcgtctattcttccgggccttcgttctttaacaacatgatgtagttcaattctcttgcacgggcccgagtcactggcccaggtggaaggggtggcgcctgggctggagaaggtgctgctggtgtagatgtgctcgtgttggtgttgatgtccgcatcaggcccgagtcactggcccaggtggaaggggtggcgcctggactggggtagatggtgcctgggctggagaaggtgctactggtgtagatgtgctcgtgttggtgttgatgtcctcatcacatgtgttttggacctaaagtagtggattgggtatgttcgttgcgaaaacgaagaaatggttacggtggcaaaaactcgtgcttgtatgcaccccgacacccgttttcggaattggtgacgtgcggcaataaaattgcgcgaaaccaccccaaacatgtgttttggacctaaaatagtggattgggcatgttcgttgcgaaaaacgaagaaatggttccggtggcaaaaactcgtgcttgtatgcacccgacacccgttttcggaatgggtgacgtgcggcaatgaaattgcgcgaaaccaccccaaacatgagttttggacctaaagtagtggattgggcatgttcgttgcgaaaaacgaagaaatggttccggtggcaaaaactcgtgcttgtatgcaccccgacacccgttttccgaatgggtgacgtgcgggaatgaaatcgcgcgaaaccaccccaaacatgagttttcaatctaaagtagtggattgggcatgttcgttgcgataaacgaagaaatggttccggtggcaaaaactcgtgcttgtatgcaccccgacacccgttttcggaattggtgacgtgcggcaaaaaaattgcgcgaaaccaccccaaacatttgttttggacctaaaatagtggattgggcatgtttgttgcgaaaaatgaagaaatggttctggtggcaaaaactcgtgcttgtatgcaccccgacacctgttttcggaatgggtgacgtgctgcaacgaaattgtgcgaaaccaccccaaacatgcgttttggacctaaagtagtggattgggcatgttcgttgggaaaaacgaaaatatggttccggtggcaaaaactcgtgctttgtatgcaccccgacacccgttttcggaatgagtgatgtgcggcaacgaaattgcgcgaaaccaccccaaaaatgagttttggacctaaaatagtggattgggcatgttcgttgcgaaaaacgaagaaatggttccggtggcaaaaactcgtgcttgtatgcaccccgacacccgtcttcggaatgggtgacgtgcggcaacaaaattgcgcgaaaccaccccaaacatgtgttttggacctaaagtagtggatttggcatgttcgttgtgaaaaaggaagaaatggttccggtggcaaaaactcgtgcttgtatgcaccccgacacccgttttcggaatgggtgacgtgcggcaacgaaattgcgcgaaactactcttaacatgtgttttggacctaaagtagtggattgggcatgttcgttgcgaaaaacaaagaaatggttccggtggcaaaaactcgtgcttgtatgcaccccgacacccgtttttggaatgggtgacgtgctgcaacgaaattgcgcgaaaccactcttaacatgtgttttggacctaaagtagtggattgggcatgtccgttgcaaaaaacgaagtaatggttccggtggcaaaaactcgtgctttgtatgcaccccgacacccgttttcggaatgggtgacgtgcggcaatgaaattgcgcgaaaccactccaaacatttcttttggacctgaagtagttgattgggcatgttcgttgcgaaaaacgaagaaatggttccggtggcaaaaactcgtgcttgtatgcaccccgacacctgttttcggaatgggtgacgtgcggcaatgaaatcgcgcgaaaccaccccaaacatgtattttggacctaaagtagtggattgatgttcgttgcgaaaaacgaagaaacggttccggtggcaaaaactcgtgctttgtatgcaccccgacacccgttttcggaatgagtgacgtgcggcaacaaaattgcgcgaaaccaccccaaacatgagttttggacctaaagtagtggattgggcatgttcgttgcgaaaaacgaagaaatggttccggtggcaaaaacttgtgcttgtatgcaccccgacacccgttttcggaatgggtgacatgcggcaacgaaattgcgcgaaaccaccccaaacatgagttttggatctaaagtagtggattgggcatgttcgttgcgaaaaacaaagaaatggttccggtgggcaaaactcgtgcttgtatgcaccccgacacccgtattctgatgggtgacgtgcggcaatgaaatcg

SEQ ID NO: 639 - DNA, 4705 bp, Zea mays
  source (0)...(0): Zea mays BAC clone full insert sequence contig bacm.pk108.h15-2.fis36
ttcggaccttcggcttaaagccttcgtccatgtcgcaatctaaatttattaacaaattaatattgcgaggggctactgttgggggccttcggcttccgaaggtcctcaaaaaccatgatttaacaatgtttctggagtataatgtgtgaacaggtatcttcggacttgtatcagaaagggagaagctcaaaagatacgaaggttgacacagtgccgaagctgtgaagcaggaaagcttcggcatgttcgcagaaaagggaaccgacttaaagatgaaaaggccatttggacctcgatagaatgctatagaattatcaccaaatgtaaaggacatgtatgtaattttgtgtgggttgtaccccgtgcctataaataggtgaacagtacccccgtactgttcacgcagatctggcatttgcttttgcgtcacacttgtattttcatctccttccaagccgaaggtacatttataattcgatattgtttctatttctttatgatgatataataaagttaaatgaatgatgttatatgattattcatgctatcttttatgtttcatatgcttcatttttcattaatgtatactgtgatgacgaaggttcgtccttcatggccttcgttcgaagatcgttatatcctaagggaaataatgcttcgaaggacgaaggactttatcgtttaacattctctgtgttgccttgttcttaactcatagcatttgagaacaagtccccaacagttcctgtggcaaaaactcgtgctttgtatgcaccccgacacccgttttcggaatgggtgacgtgtggcaacgaaattgcgcgaaaccaccccaaacatgagttttggacctaaagtagtggattgggcatgttctttgcaaaaaacaaagaaatggttccgttggcaaaaactcgtgctttgtatgcaccccgacacccgttttcggaatgggtgacgtgcggaaacgaaattgcgcgaaaccaccccaaacatgagttttggacctaaagtagaggattgggcatgttcgttgcgaaaaacgaagaaatggttccggtggcaaaaactcgtgctttgtatgcaccccgacacccgttttcggaatgagtgacgtgcggcaacgaaatggcgcgaaaccaccccaaacatgagttttggacctaaagtagtggattgggcatgttcgttgcgaaaaacgaagaaatggttccggtggcaaaaactcgtgcttgtatgcaccccgacacccgttttcggaatgggtgacgtgcggcaatgaaatcgcgcgaaaccaccccaaacatgtgttttggacctaaagtagtggattgggcatgttcgttgcgaaaaacgaagaaatggttccggtggcaaaaactcgtgcttgtatgcaccccgacacccgttttcggaatgggtgacgtgcggcaatgaaattgcgcgaaaccaccccaaacatgtgttttggacctaaagtagtggattgggcatgttcgttgcgaaaaacgaagaaatggttcgggtggcaaaaactcgtgcttgtatgcaccccgacacccgttttcggaatgggtaacgtgcggcaacgaaattgcgcgaaaccaccccaaacatgagttttggacctaaagtagtggattgggcatgttcgttgcgaaaaacgaagaaatggttccggtggcaaaaactcgtgctttgtatgcaccccgacacccgttttcggaatgggtgacgtgcggcaacgaaattgtgcgaaaccaccccaaacatgagttttggacctaaagtagtggattgggcatgttcgttgcgaaaaacgaagaaatggttccggtggcaaaaactcgtgcttgtatgcaccccgacacccgttttcggaatgggtgacgtgcggcaatgaaatcgcgcgaaaccaccccaaacatgtgttttggacctaaagtagtggattgggcatgtacgttgcgaaaaacgaagaaatggttccggtggcaaaaactcgtgcttgtatgcaccccgacacctgttttcggaattggtgacgtgcggcaataaaattgcgcgaaaccacccgaaacattggttttggacctaaaataatggattgggcatgttcgttgcgaaaaacgaagaaatggttccggtggcaaaaactcgtgcttgtatgcaccccgacacccgttttcggaatgtgtgacgtgctgcaacgaaattgtgcgaaactaccccaaacatgagttttggacctaaagttgtggattgggcatgttcgttgcgaaaaacgaagaaatggttccggtggcaaaaactcgtgcttgtatgcaccccgacacccgttttcggaatgggtgacgtgcggcaatgaaatcgcgcgaaaccaccccaaacatgtgttttggacctaaagtagtggattgggcatgtacgttgcgaaaaacgaagaaatggttccggtggcaaaaactcgtgcttgtatgcacccagacacctgttttcggaattggtgacgtgcggcaataaaattgcgtgaaaccacccgaaacattggttttggacctaaaatagtggattgggcatgttcgttgcgaaaaacgaagaaatggttccggtggcaaaaactcgtgctttgtatgcaccccaacacccgttttcggaatgggtgacgtgtggcaacgaaattgcgcgaaaccaccccaaacatgagttttggacctaaagtagtggattgggcatgttctttgcaaaaaacgaagaaatggttccgttggcaaaaactcgtgctttgtatgcaccccgacacccgttttcggaatgtgtgacgtgctgcaacgaaattgtgcgaaaccaccccaaacatgagttttggacctaaagtagtggattgggcatgttcgttgcgaaaaacgaagaaatggttcctgtggcaaaaactcgtgcttgtatgcaccccgacacccgttttcggaatgggtaacgtgcggcaacgaaattgcgcgaaaccaccccaaacatgagttttggacctaaagtagtggattgggcatgttcgttgcaaaaaacgaagaaatggttccgttggcaaaaactcgtgctttgtatgcaccccgacacccgttttcggaatgggtgacgtgtggcaacgaaattgcgcgaaaccaccccaaacatgagttttggacctaaagtagtggattgggcatgttctttgcaaaaaacgaagaaatggttccgttggcaaaaactcgtgctttgtatgcaccccgacacccgttttcggaatgggtgatgatgcggacatcaacaccaacacgagcacatctacaccagcagcaccttctctagcccaggcgccaccccttccacctgggccagtgacttgggcccgtgcaagagaattgaactacatcatgttgttaaagaacgaaggcccggaagaatagacgaccagcccaattgcggcccataatggacgacctagggttggccgcccctaggggctgcgccccctctctatttattcaggagctgcgcctcctttatttcccgagttttgttttacgttagccttagctactttcgaacacgcgcaaatctgcgctgtcctcgtgtattcagaactccaccctcgagtaatagattggattgctcgcatcttgttcttgttcgttcttcgattgcgcacaggaaacgatcttcgtgatcaggccgatctcgcatcagcaaggtcggtaaccacagggagttggttcagcgattgcattggcgcctcgggcttgctcgtcgtagtcggatcgcaagggtcatcttccgccaaatcggaattatctctactcgccgaaagatcgggcacctcagctacatcaattggtatcagatttccaggttgatcggtgagtttatcgagcgttttttttcctacagttcacaaaaccacataaaaattcaggttagatcttatcccagcacccttttgagcctcgcactttctttcaataatctgcattgttgaatttgtgtgctttcgcgtttccttgttgctggttgcattgtgttcttccaccattcaaatcctagcgccgccaccatctcccctttgatcacgccacaaaccgagtcaacattgtttccttgtttttctccttcgtttacgtcaaaaaaaaaaacagaaaaaacaaaccgagtcaacgaccgtttccttgtttttctccttcggttacgaaaaaaaaacagaaaaaaaaaccgagtcaacatcgtttccttgtttttctccttcggttacgtcaaaaaaaaaacaaaaaaaaagataacgaaggagaaaggatacggttgtttttcatcccggtcgtttttagaacataacttgaggcaccttccgtaaaacgggcataacttttcgctcgggtgtccaaaaaatctgaaatttttacaggagcttgttgacaccattctgagcccggccaaactcaccttcggtctgtttgggttcgacaaaattgtcaaaaaaattcaggaaaataaagaaaaaaaatccgtcaaagttctcgcacgcttttcagagaacttcctgattttctgtagaccacatctgatctctgttttaggtaaaacttcgtctagctcctatcttgttgcttcttgtgctgagaaaaatatcaaaaaaatcatacaaaaaaagaaaaacaaaatcacctgtgatttctac

SEQ ID NO: 640 - DNA, 7129 bp, Zea mays
  source (0)...(0): Zea mays BAC clone full insert sequence contig bacm.pk108.h15-2.fis37
gtggaatttacaattggttcataccatgattatattgattgtgatgtggtacctatgcaagcttgctctatgttatttggtagaccatgacaatttgataaggacaccgtgcatcatggtaaaacaaatcactactcttttatgcataatgagaagaagcttgtattgcaccccatgtcccccgatgctattttgaaggatgaagttgctagagcttgcaaagagaaaaataaatctgttcataataaaaatctaggtgctgcaaaggagttggtacaacataagagtgacaattctaaatctgctcaagtgaggaagacagaaatacaactgaaaagtgcttgttttcttgcttccaaatctgatttacttgaattaaatgatgttgcttcaatctgctatgtatttatttgcaaggatgctttgttctcacttcacaacataccatctactttgccttctactgtcactaatcttttgcaggaatatgctgatgtatttccaaatgatgtgccacctggcctgccaccgataagaggaattgagcatcagattgacctcatcccaggggcttccttgccaaaccgagcgccatacaggacgaacccagaagaaaccaaggagattcagtgagaagtacaagaattactcgataaaggttatgtgtgtgagtcccttagtccttgctctgtccctgttttattagtcccaaataaagattgctcatggcgcatgtgtgtagattgtcgaacaattaataacattaccattagatatcgtcatcctatccctaggttagatgatatgctgggatgaacttagtggctcgatgattttctctaaaattgacttacgtagtggatatcaccaaattcgcatgaagctaggggatgaatggaaaacggcatttaaaaccaagtttggtttgtatgagtggttagtcatgcctttcggtctcactaatgcacctagtactttcatgagattaatgaatgaggttttacgtgctttcattggaagatttgtggtcgtctacttcgatgacatcttgatctatagcaaatgtctagtagatcatcttgatcatctacgtgctgttttcaatgctttacatgaagcgctcttatttggtaaccttgacaagtgcacattttgcacagaccgtgtctcttttcttggctatgttgtgacaccgcagggaattgaagttgatcaggctaaggtggaggccatagatagctggccagtccctaccacggtcacgcaagtccgaagctttctcgggcttgcggggttctatcgtcgatttgtgaaagatttcagcaccatcgcagggccattgcacgagcttactaagaagggtgctccattttcttggggcaaggcgcaagaggttgcatttgaaacattgaaggataggttaactcatacaccccttctccaattacctgatttcagtaagacttttgaattggaatgtgatgctagtggtattggtttgggtggtgtcttgttgcaagaagggaagcctattgcttattttagtgagaaactgaatggacccagtctgaactattccacttatgataaagaattatatgccttagttcgaactttggaaacatggcaacactacttatggcctaaagaatttgttatacattctcatcatgaatctttaaagcatctaaggagccaaacaaatctgaaccgtaggcatgccaagtgggtcgaatttattgaatcttttccctatgtgatcaaacataagaaaggaaaagacaatgtcattgcagatgccttgtctcgccgttataccatgctgtctcaacttgattttaagatttttggcttggaaacaattaaacaacaatatgttttcgatgctgatttcaaagatgtgctattacattgtaaagaaggaaggacatggaacaaatttgttctcactgatggctttgtgtttcggactaacaaattatgcattccagctggttccgtgcgtatattattattacaggaagcacatggcagtgggttgatgggacactttggtgtgaagaagacagaagacatcctggccagccatttcttttggccgaagatgagaagagacgtggagcggtttgttgcttgctgcactacatgtcaaaaagctaagtctcgccttaattcacatggtttatacatgcctctcccagttcctagtgcaccatgggaggatatttctatggactttgttttacggctatctagaacaaagaaggggaggaatagtatttttgttgttgtggacagattttcaaaaatggcacactttataccatgtcacaaaactgatgacgctacccatgttgctgatttgttctttcgtgaagttgttcgtttgcatggggttccaaacactattatgtccgatcgggataccaaatttcttagtcatttttggaaaacgttatgggctaagttaggaactaaattgctcttttctactacttgtcaccctcaaaccgatggacaaaccgaagtcgtaaaccatagtttatctaccatgcttagggctgttctgaaacataacatcaaattgtgggaagaatgtttgcctcacattgaatttgcttataatcgttctcagcattctacaactaaactatgcccttttaaaattgtgtatggttttgtccctcgtgctcctattgatcttatcgccatcccacattctgaaataacgaattttgatgcttctcgtcgtgctgagctgattataaagctgcatgaacaaactaaagcaaatattaaagccatgaatgctaagtatgaagaagcaggtagcaagggtagacagcatattacctttgaacctggtgatttagtatgggtgcatttaaggaaagatagtgatgaggacatcactatgagtacgactacaccagcagcacctccacatcaagcgccacttccttcataagctgggccaatcactcgggcccgtgccagagatcttaacttcgtcatgctactgaagaatgagggcccagaagaatagacgaccagcccaactgcggcccatagtggacgacctagggttggccgcccctaggggctgcgccccctctatttatccaggagctgcgcctcctttattttcgagttttgttttacgttagccttagctactctcgaacacgtgcaaatctgcgttgtcttcgtgtattcagaactccaccctcgagtaatagattagattgctcgcatctttttcttattcgttcttcgattgcgcacaggaaacgatcttcgtgatcaggtcgatctcgcatcagcaaggtcggtaaccacagggagttggttcagcgattgcattggcgcctcgggcttgctcgtcgtagtcggatcgcaagggtcatcttccgccaaatcggaattatctatactcgccgaaagatcgggcacctcagctacatcaagcaacacctccacatcgagcgccacttccttcattagctgggccaatcactcgagcctgtgccagagatcttaacttcgtcatgctactgaagaatgagggcccagaagaatagacgaccagcccaactgcggcccatagtggacgacctagggttggccgcccctaggggctgcgtgatgcacccagcccaggtggggttggccgaggcccaacaaattagggttgcccggagcccaacagttcattaagcacacccaactcagggaaaggcccaatcgcccaaaagactagcccaatgggggaagggtggctctcccttttaaagtggcttcctcctcccaagttaagcgaggtgggataattctgaggctcacacggtcgccgtccgactacaattgggccaactgggccaattgcgtctttgccaacgggtaatagtggaggatgtcctcatcattcccaccttcttaaaatgggccctagctctgataccagatgatgcacccagcccaggtggggttggccgaggcccaacaaattagggttgcccggagcccaacagttcattaagcacacccaactcagggaaaggcccaatcgcccaaaagactagcccaatgggggaagggtggctctcccttttaaagtggcttcctcctcccaagttaagcgaggtgggataattctgaggctcacacggtcgccgtccgactacaattgggccaactgggccaattgcgtctttgccaacgggtaatagtggaggatgtcctcatcactgcgcccctctgtatttatccaggagctgcgcctcctttgttttcaagttttgttttacgttagctttagctactctcgaacacgcgcaaatctgcgctgtcttcgtgtattcagaactccaccctcgagtaataaatttgattgctcgcatctttttcttattcgttcttcgattgcgcacaggaaacgatcttcgtgatcaggccgatctcgcatcagcaaggtcggtaaccacagggagttggttcagcgattgcattggcgcctcgggcttgctcgtcgtagtcggatcgcaagggtcatcttccgccaaatcggaattatctctactcgccgaaagatcgggcacctcagctacatcaattggtatcagatttccaggttgatcggtgagtttatcgagtgtttttttctcctacagtccacaaaaccacataaaaattcaggttagaccttataccagcacccttttgagtctcgcaccttatttcaataatatgcattgttgaatttgtgtgctttcggttcatttgttgctggtcgcattgtgtttttttctcaccatccttcttctaccttgtttttctccttcggttacatcaaaccctagcgtgtcgcaaccatcttccttgtttctctccttcggttacatcaaaccgattcaacgccacaaaccgagtcaacgccgcttccttgtttttctccttcggttacgtaaaaaaaacagaaacaaaaaaaagaaaagaaaaaaaagaaaaagaaagagaaagcatagaaccagagaacaaacaaaaaaatagggaaaggaaacaaagcggttgtctcatctcggtcggtttaaacataacttgaggtaccttccttaaaccgggcataacttttcgctcggttgtccaaaaaatctgaaatttttacaggagctagttgacaccattctgaggccggccaaactgacctatggtctgtttgggtttcgacaaattgtcaaaaaatttcaagaaaataaagaaaaaaattcgtcaaagttctcgcacgcttttcagagaacttcctgattttctgtagaccacatctgaactttgttttagtgaaacttcttgtagctcctattttgttgcttcttgtgctgagaaaaatatcaaacaaatcatacaaaaaagaaaaacaaaatcacttgtgattcctactagtggcctcgctagtacaatatttacagtactgccattctgctagttccatccgtcctttgcacttgtggccagcaatatagtttcgtgttttgcaatataattcaactttgcattattgtttgatcgtgctaatccttgacttaagtgtagcctacccaaaactccacatatttctacgacgagaaggtttctgtttctccaggcaatcgctcatccaatctttcaccggttccacctgttccacctgttggttgcagttcaccactgtggcttggtaagaacggataagaacttgataacagcactagtgtgagcgccttgtgagcagtacacccctgtttttgtcgttggtttttctccttttggtgtttgcgctaactatggcaggagcacacgacatggtggatgcccagttgcaggaagtaaggggacaagttgatggacttgctgctcacattagggcgatgcatgaacggcttgattcaacgatcatttcgacgaccgagcgtttcgaccaacttgaccttgctcaaacggcgactcgtaccatactcgacaccatcctggcacgccttgatgcattgaccacaaagatggagcaggaatacggcggtgacactgagcaggacgatggagatcgccgtggtcgtgcacgtcgtgtggttcgtcatccccctaatgacttattttctaagattaaatttaaaattccatcttttaatggtaaatatgatcctgctgcatatcttgattgggaattagaggtagaacagaaattttcatgccatgatattcctgctaatagccaagtgaaggctgccattagtgaatttactgattttgctttaatttggtggcgtgagtataaacaaaaacttcccattaacagtgtcattacttggacccaattaaaaactgccatgcgccacagatttgttccttcctattatgctcgtgatttgcttaacaaaatgcagcgttttcaacaaggttcacagtctgttgaggaatattaccaggagttatgttggggacttgttctcaagtgctaagagtttaagaacaaggcaacatagaaaatgttaatcgttaatgcccttcgtccttcgaagcactatttcccttaggacataatgccttgcggacgaaggttatgaaggacataccttcataaattaatcaaataatgacgaaggatgaaatgtgaagaatgtaaaggaaaacatgaacaatcatttattattattgaacataaacaaaaatattattgaacaacaagtgtaccttcaatcggaaggaaatgattgtacaagcgtgacgcaaaaagcgaatgccaagtcagcgtgaacagtacagggatactgttcacctatttatagacacgggacacagcccttacaaaattacattcatgccctttacatctgacaataactctatagtaatctattgaggtctgaatagccttttcatctttaagtcggttccactctctgctgttacgccgaagctttcctgctcaacagcttcggctctgtatcaagcttcgtattattccggtctgctgcaatgccgattttagtctgagggtacctgttcacatattgtactacagaaatactgttaaattctgtttttgaggaccttcggacgccgaaggtccccaacagtagcccctcgcaatattaat

SEQ ID NO: 641 - DNA, 5809 bp, Zea mays
  source (0)...(0): Zea mays BAC clone full insert sequence contig bacm.pk108.h15-2.fis38
ggctattaatacacaggccaccctatcctaaggttaggttttgcatattcctacatggtactagagccacacaaacttcctccctcccctagccggccgccagcccctggccgccgccgctgcccctttccccatccccctccggccaccgccagatcgcctccatcccctctctccttcctggtcgccggccgcacccgcttctcccccttctccggtcgacgtcttcctcctccccccggccggcgagctcgggctcaaccgcgtcgtcgaccatccggccgcgctcacctctccctcccccagccggcgagctcgggctccaccgcgccccgaccagctagcgtgctcggtggccgcggcaccgcccaccacatccgcgccctcccctcgcgcgcggccacatcgtccgactgaagcagcaggcgcgtgcggctgcgcgtggcgctgtcggccacgagcgccttggaccgttgcaaccgccggagcgccgactcgctgctcttgcttcctctctgccccgcccccagcacctacagagcccgccgatccctgccccggccgccgaatcttcgtcgtccaccgccggccgccatctggcccctctcctgctgcgctgggccccggcgccgtgcccgctcttcccaagccgtgccgcaagtgggtcggcctcgccggagcagcctgcccccctgcgctccctcctgtcgtgccgcagtgggttggcctggccggagcagcagtcgtggccgtacagcccgctcaccccctgtgcgccctgcttctgtgacacagtggacatcctcgccctcggctttgctgcgccggttgagctccgtcccggttccatggcgtccccaccaccacacatgagctttgcctcgcccgctgctcccgtggctcctgactaccacggtcgtgcttttgccctggccgtcggcgccacttcttgtctccgcccgtttctgtcgggatggctgtgcgcgtccttctcaacgatggccagctcgtccggggcaccttcgtgagcttcgatcccaccatgagccctgtcctttgtgactgcgtcgaactccacccccaggccgaccgtcacgtgcctagaccccttgtcttccctcgtgcagtgatcgcctccctggccattgagccctcgttccctccctcccctcccagtaaccacgtcagagctcatcctctggtctctccgtgcaccctatggcctccccactgtctccctctcccaccgattgggtggtcgactccggggcctccttccacaccactcccacaactagttcgttattccactcccatccaccacacccctcacatccttcctccattgtcgtaggcaacggttccactcttccggtcacatcagtaggtgcatcagttcttcctggaccattctgccttaacgacgtccttgttgctcccggtctgactcatcccctcctctcggttcgtcgcttcactagtgacaaccactgctttatggagttcgacccctgggatctcaccatacgccaccttcccacacatgttgtgctcgctcgctgtgacagctccggtcccctctattctcttcacttgccctccacttcccccaccagaatagcctcatctcctgcacttactactaccaccacatcacatgctcttgctactaccaccacctcctccgccatttggcactgttgcctcgggcaccctggacctgacgtcatgtcccaactctccagccactcagacatatcctatactcgaggctcttctgagcacctctatcatgcttgtcagctcggccgtcactctcgtcttcctttttccacttccacgtccagggttgttcaggcctttgatcttgtccactgtgatctctggacgtctcctgtccttagcctctccggctacaaatactacctggtcattctggacgactactcccattttctttggactttcccccttcggttgaagtccgacacgtttaccaccctcactcacttcttcgcctgggtatccacccagtttcagcgcccggttcgtgctttgcattgcgacaacggccgcgatttcgataaccacgcctctcggtcattcttcctcaccagtggcgttcagctgcgtctctcgtgcccctacacctccgcccagaacggtcgggcagagcgcatgattcgcaccaccaccaacatgatccgctgccttctcttccaggcgtctctccctgccagctactgggcagaagccctacacaccgccacccacctcctcaactgtcttccctccaaggcggtgagccaccctactccctacttcgccctgtacggcacagcccccacctacgaccaccttcgcgtgttcggttgtgcctgctaccctaacacttctgctactgcccctcataagctttctcctcgctccacccactgcctcttccttggctactcatctgaccataagggatatcggtgtctggacctcacctcccaccgcatcatcatctctcgtcacgtcgtctttgatgaggatgtgtttccccttgttggcccctccccgcctaccgatctcgactccctcctcgagtccgatccagtctccccctcctcccaggcgccccgccttgcgtcgttacccgcaccccatgcggcctcgacgccgcggctcgcacatattcccacgccacgcgcggccccgtcgatcacgcctgcgccacgcgcggccccgacgaccacgcatgtgccacgtgcggccccgtcgaccacgcctgcgccatgcgcgaccccgtcgaccacgcccgcgcctcgggcggccccgccgacccctcccgcacctcgcgcggccccgtcgacgccaacggttcgcttcaccgaccccgcgctcatctaccaccgtcaccgccacgtcactacctcggcagtcgctgacccgggcccgttgacgagcccggtgcgcttcgccgaccccgccgtcatccatcatcgctgcgagtcggccacgcccgcagcccctgacgtcccggcagaccgccccgagccaccgatgtaccactcggtcgctatccaccgcgatccctggcacgtccacccgatggtgacccagcgcgccactggcgtccttcgattgtcgaccggctgatcttggcagctgctacgcctaccactccaccggacgcttccccggtcccctcctccgttcgcaccgctctcgccgaaccacactggcgacgcgctatggaggagtacgcggccctcctggccaaccacacctgggacctggtgccacgtccaccaggcgccaacgtggtcaccggcaagtggctatttcgccacaagcttacttcggacggctccctcgatcgctacaaggcccgttgggtccttcggggcttcacccaacgccccagagtggactacgacgagacctctagccccgtcgtcaagttcgccactgttcgcaccgtcctctccctcgccctctcccgggactgggcgatccatcagctcgacgtcaagaatgccttcctccacggcactctgacggagactgtctactgcagccagcccaccggcttcgtcgacgaagcccgtccagatctggtctacaggctgaaccgctccctctacggcctcaagcaggcgtcgcgggcctggtacagccgcttcgcttcctacttgacctccatcggcttcgtcgaggccaagtcggacacgtccctcttcatctaccaccgcggcgacgacaccgtcttccttctgctctacatcgacgacattgtgctcacggcatccaccgccgacctcctacagcgcacgatcgtcgccctgcagcgggagttcgcgatgaaggacctagggcccctccaccacttcctcggcatcaccgccgagcgccggccccagggtctcttcctccatcagcgccagtacgccatcgacatactggagcgggctggtatgtccgactgcaagccctgctccacgcctgtcgacactcaggcgaagctctcagaggacgtcgggcccctggtcgccgatgcgacatcctaccggagcctgaccggcgcgctccagtacctcaccttatccaggcctgacatcgcctacgtcgtccatcaagtgtgcctccatatgcacaccccgcgggagcctcatctcaccgctctcaagcggatcctgcgctacctccgtgactccctcgactacggccttcttctccgaccatccccgacgtcggaactcgtggtctacaccgacgccgactgggctggctgtccagacacgcgtcgatccacctctggttacgccgtgttcctgggcgccaacctcgtctcctaggccgccaagcggcagcccgtcgtctctcgctccagtgctgaggccgagtaccgcgccgtggccaacggcgtggcagaggcctcctgctgcgacagctcctccacaagctccacagtcccctccagcgcgccaccctcgtctactgcgacaacgtcagcgcagtctacctctccaccaatcccgtacagcatcagcgcacgaagcacgtggagatcgacctgcacttcgtccgcgagcgtgtcgccgtcggtgacgttcgggttctcagcgtcccaactacgctgcagttcgctgacatcttcacaaggggttaccgtcgagtgtatttttagactttcgctctagtctcaacatctgtacaggatagagttgtgactgcggaggggtgttggaactgtattagggtttgggtacatttactctcttgtccctctgtaatgggccaggcccaactccaaatggctattaatacacaggccaccctatcctagggttagattttgcatattcctacaagaacaagacttgtacaaacttctgacataaaatctgctatttcgataaattaaaagatcaaattaaaaagaaactaatctctgcaactcctctaggatgctggattttttccttgtagacatctagacaagtgagaagggcaggtctggcacaatggtgagaaacctttccactgagcaaaaggtctaggattcaatgcagcctctctgcaaaatgcagaggtaaggattgccttggttactcctccggaccccactcatgtgagagctgccagcactgggtctgtcatttttttagacatctagacaggtcttgctgtagtcctaagttgtcttcggtggatcgtgtaaaataggggacgtggcactgtaaattacacttttaataggactaagatgcatcagcagtggctaaaacttgtccaagcatgttatcgagatccctgagctattaatttgcaatttcatgtccctcaacttgttatgtggttcactcaaggtgcaaaccccatggtaaatcctttggctggcgacgtggacactaacaagactctatgctgatggacattaacaaggtgtgaacgagaggggggagaaagagatgtaggggctgccaagtaggatggtcgtggactagctgattttgaaggatcgaaccctgagtgaaccatttaggaagatcagggatgttttgaatccaaactaatcgtttgggaacctagatgacattcccagacaatttgaagaatgtttgtgtattttattcttttaaaaggtgcctcaaaaacaatcacaaaaaatcaacttgggaaaaaagacccgtatgaaacagaaaatataactaggtgtagcaaaaagaaaacctgaatttcaagtgggtgcccatggattcccattcgacgatcaatcatgcatgaaccatctgttacgagcaatgtagggaacatgtcg

SEQ ID NO: 642 - DNA, 12175 bp, Zea mays
  source (0)...(0): Zea mays BAC clone full insert sequence contig bacm.pk108.h15-2.fis39
ctaatgcagacaacatttgtgattaggacagacacaagtttacaaggacaataaccatgcaaaactcaatccaagctccatggtctcaaaaaagaaaaagaaaaaagaggcacacattttttctgtacatgataagttagctcatgcacattgttttgtgtgtaggcactcttctattcagccctcttgtgtgcgcgtgagatgttgactcaagaagatggatcagctgacttaatccgtgccctgaacaatagacttattgcactgtcctttcatatcagagagtactattggcttgacatgcaaaaattgaatgagatatatcgatataaaacagaagaatattcttatgatgctgtcaacaagttcaacatttaccctgatcagatttctccatggcttgttgagtggatacctcctaagggtggttactttattggaaacctccagccagctcatatggacttccgattcttttcactgggaaatttatggtcaatagtaagcagcttggcaacaactcatcagtcgcatgccattttagaccttattgagtctaaatggtctgatttagttgcagagatgccactaaagatatgctatcctgctcttgaaaaccaggaatggaaaatcatcactgggagtgaccctaaaaacacgtgagccttagatgttttttcaatttttaccctctacctgggatcatgttgcagttcctttttacatgcttggcaatttctttttcgtacaggccttggtcataccacaatggaggatcctggccaacattactgtggcaggtttgcattctctaaactggtttcctatttctgtagatttactgtgtcttgctgttgaattggtttttatctgtccgcatgcaaggcatggtgtcattttgacacactgctgcatttagccaaacttgctgagatttactggcaatctgttcgctcgcattttgcacttctcctttatgatgcgcacattgaatgttgttgagcagtggcaaccattttgtgcagctcacagtggcatgcatcaagatgaacagaccagaacttgctgccaaagctatagaagtagctgagaggcgaatcgctactgacaaatggccggagtactacgacaccaagagagcacgattcattgggaaacagtcgcggctgtaccaaacgtggtctattgctgggttcctagtagccaagctactaatagaaaagccagacgctgctaggattctgtggaacgatgaggatgctgaaatccttaatgcttcgagcacaaacagaaaacgtggcaagaaagtgttgaagaaaacatacatcgtgtgagttctcgcagcaagttcgattaaattcctcagttagcatttttaagttgtaatataggaagtgttgtccctgtatataaacttaaatgaggttgcatttttgctggggagggtgcctgctgttggaattggatgctgttattgtcgatgcatctggctttgcaacaaatcatagacctgcctcgtagtttcgctatacactttatttggcatgacaagttttcggagtctcattaccggactgaagccatatttgaatacactaagctaacgttagctgctaaaattagctgaagacattcaaataacttaactaatattctagctagtaactgcttttagctgaatgtattcaaacacccacctataatagtccagctatctattagttgcactcataactatccattagtttaataccttggtcagttgagctaacatcagctaatagttagtcaattactagttagctagctgatttcactagcaatttttagtgacataactattagtactactgtattcaaacatgctcttaattttggaatatggatttacctcgttgctctggtttttccaggtagtatttacgaacatcttttgaaacacacgagtttgtcacaggtgctgacaacaatgttacatagcaagaccaagagttttaactaaaaatttgatatcatcttgatttagctatttttgtaaaatatataagaaacccccataaaaaggtaggctgcttccggagtctatctaaattttgccatcatatttagatcgtatttaaatgcattagaggtaatagttagctgctaaaaatttagttagagacatctaaacaatctatgtaacattttagttattagatgcttttaggtggaggcatttaaacaccctagctaagcgtccaactaactattagttattagttagccacctactagttcgtcaactaactacactagcaattttagtacatccaaacaagcccttaaaactgccatgtcctatgtccaatgtcttcattcgtcttcacgacaatcacaaataacgagccaatgtccttccacatgtagtcggctgccgtctaagagatcctttggaacataggaatttcagagaaataatacagaaattttacatgaatcaattaattttcacaagaaaagcataggaaattggaaaaaaatccagcattccaaagggccccagagtcctgaggccataggtcggttgtgctcgtccgctgatggacctcagtctaaacactagtacaatttggctctatacaagcggtaggctttttacatcacaggcggttcgattagaaaaccgtctaggatatcgcaggctattcgaaccgcatgtgatgtattagtatcacaagcggtttttttaggaccgcctgtggtgctctattcttttcacaaacggaccctaatgaaaaaccgtctgtgattgtgatttgattaccatattaatattttaatttttaacagaaatatgaaaataaaatttaaatgaattaatattttaatttttaacagaaatatgcaaatacaatttaaatgaattaatatttaatttttaacaaaatatgcaaatacaatttaaatgaattttaatagcacacatagataactagagagattttaaattaattagcaaccacaatgcatagtcgatcatacatgataacaaattgtcggcgtttcgagaccggagggtccctgggcagacgagtgaatgtcgccgcgtgccccagcccagatgggtcgagcgcgagggcgagcgcgaaggggggagatcgaggcggccggagaccggcgtgagagagctgggaatcccgcggcctccgtgttcgtcccgcgcccaggtcgggtgcgcttgcagtagggggttacaagcgtccacgcgggagagggagcgagcggcttcaagcgagcgcctgtctcgtcctcgtccccgcgcggccaaccccctctaagagggccctggtccttccttttataggcgtaaggagaggatccaggtgtacaatgggggtgtagcagagtgctacatgtctagcggaggagagctagcgccctaagtacacgccgttgtggcagccggagagattttggcacccagctggtgtgatgtcgtggccgtcggaggagcgatggagcctggcggagggacaactgtcggagcgattgagtccttgctgacgtcctcttgcttccgtaagggggctgagagccgccgtcgtcacagagtatgcgggacgccatcattgcctgtctggcggagcgagccagatgggacgccggtcttgttccctgcggcccgagtcagctcggggtagggtgatgatggcgcctcctgttgacgtggccggtctgcgtcctaggttgggtgatgtggaagcttgatgaagctgaggtgcccgatctttcggcgagtagagataattccgatttggcggatgatgacccttgcgatccgactacgacgagcaagcccgaggcgccaatgcaatcgctgaaccaactccctgtggttaccgaccttgctgatgcgagatcggcctgatcacgaagatcgtttcctgtgcacaatcgaagaacgaacaagaaaaagatgcgagcaatctaatctattactcgagggtggagttctgaatacacgaagacagcgcagatttgcgcgcgttcgagagtagctaaggctaacgtaaaacaaaactcgagaataaaggaggcgcagctcctggataaatagagggggcgcagcccctagggggcggccaaccctaggtcgtccactatgggccgcagttgggctggtcgtctatttttctgggccctcattcttcagtagcatgacgaagttaagatctctggcacgggcccgagtgattggcccagctaatgaaggaagtggcgcttgatgtggaggtgctgctggtgtagtcgtactcatagtgatgtgctcatcatcctccccttcttgaagtgaagtcgtcctcgacgacaactcctcatcctcggccatatatggtttcaaatctgcaacattaaaactagtggaaacaccaaattctgcaggcaggtcaaggatataagcattatcattaatctttgttagcaccttaaaaggaccagcagcacgaggcattaatttagaacggcgcaaagtaggaaaccgatcctttctcaagtgcaaccaaaccatatcacctggctcaaaagtaacatgttttcttcctttactaccagcaacctgattttttgcattagtagcagcaatgttctgtttcgtttgttcatgtatggtaatcatttgttcaacatgtgcagcagcatctacatgtggggcgtttgcagcattaagcgaaatcaaatcaataggtgccctagggatgtaaccataaacaatctggaaagggcacatctttgtagaagaatgcgtggcatgattgtaagcaaattcaacatgaggcaagcaatcctcccaacgtctcaaattcttgtctaaaacagccctaagcatggtagataaagttctatttactacctcagtttgtccatcagtctgagggtgacaagtagtgctaaacaacaatttagttcccaatttattccaaagagatctccaaaaatggcttagaaacttagcatcgcgatcagagactattgtttttggaataccatgtaaacgaataatttctctaaagaacaattcagcaacaatgctagcatcatcagttttatgacaaggtataaagtgagccattttagagaatctatcaacaaccacaaaaatactatccctccccttcttagttctaggcaagcccaaaacaaagtccatagagatatcaagccaaggagaagaagggacaggcaaaggcatatacaaaccatggttgttcaaccgtgacttagctttctgacaagtagtgcagcgtgcaacaaggcgctccacatcagcgcgcatccgaggccaaaagaagtgggcagccaacacctcatgcgttttgtagacgccaaaatgccccatgagaccgcctccatgcgcttcctgtaacaacaaaagacgaaccgagctagctggaacacacagcttgttagcgcgaaacaggaacccatcctgtatgtgaaatttgccccatggtatcccattaatacaatggctaaaagcatctttaaaatcagcatcgtcaacatattgatccttcacagtgtccaaaccaaagattttaaaatctaattgtgacagcatggtatagcgacgagataaagcatcagcaataacattgtccttcccgttcttgtgtttaataatgtaaggaaaggactcaatgaattcgacccatttagcatgacgacggttcagatttgtttgggtacgaatatgttttaaagcctcatgatcagaatgaattatgaactcacgatgccaaagatagtgctgccaagtatgcaaagtgcgcactaaagcgtaaagctccttatcataagtagaatatttcagactagcaccgcttaatttttcactaaaataagcaactggttttccttcttgtaacaaaacagcacctagcccaataccgctagcatcgcattcaagctcaaaaactttattaaaatcaggcaattgcaagaggggagcttgggttaacttatctttcaaagtgctgaacgctacctcctgcgaatcactccaagcaaacgacacatctttctttgtaagctcatgtagaggcgctgcaatggagctaaaatcacgaacaaatctgcggtagaaaccggcaagtccaagaaagctccgaatttgtgtgaccgtcgtcggtgtaggccactcccgaatggcagcaatcttgctgctatccacctcaatgccttgcggagtaaccacataaccaagaaacgagacacgttgcgtgcaaaatgtgcacttttccatgttaccaaacaagcgagcaacacacaaagcatcaaaaacagcacgcaaatgttcttaaatgctcctctatagacttgctgtaaataaggatatcatcggaataaacaacacaaacaaacctatgaaggcccgtaaaacttcgttcattaaacgcataaaggtgctgggagcattagtcaatccaaatggcataaccaaccattcatataaaccaaatttcgttttaaaagccgttttccattcatcaccgagtttcattctaatctgatggtaaccgctacgcaaatcaaccttagagaaaataacggcaccactaagctcatctaacatatcatcaaggtgtggaataggatatcgataacgaactgtgatgttattaatagcacgacaatctacgcacatatgccatgacccatctttctttggaacgagtaaaacaggaaccgagcaaaggctaagagactcacgaatgtaacctttatcaagcagtgtctgcacctggcgctggatctccttcgtctcatctggatttgtacggtacggggcgcggttcggaagagaagcgccggggatgagatcgatctgatgctcaatgccacggaggggaggaagacccggtggtaagtccgtaggataaacatcagcatactcctgcaaaaggttaacaacagcagggggtatatccaaagacggtgcatcatcaagcggaacaagcatgcgcgagcatacaagtgcataacagggcatatgagcttcatggagatcatcaaaatcagcacgtgtagcaagtaaaacaggagagtgcaacttgatttcagatttaataggtgcggctgatgtcgatttgacttgttgtgcagttttagcagccctagtaagatcatctttcaaaatttggtcaggggtcattggatgtataattattttctggcctttaaacatgaaagaataatgatttgaacgaccatgatgtaaactatcagtatcatattgccaaggtcgacccaataacaaagggcatgcttccataggaataacatcgcaatcagcataatcagaataagaacccagcaaaaaggggacacgtaccgaacgtgttacctttattttaccaccatcattaagccattgaatgtgatacagatgtgggtgtgtgcgagtgggcaaggataatttctctaccaacgctgtacttgccaaattgttgcagctgccactatcgatgatgatgcgaatcgaccgttcgtgcacaacgcccttggtatggaatagagtgtgtcgctgattttttcggcctgggcaacctgtgtgctgagaacacgctgcacaacaagactctcatacctatcggcgtcgatgggatcaacgtggacttcctcattttctgcatggttagtggcaatcatagcatgactagtttcctcagaatcactggctgaagagtactcaccattgtcacgtataagcaaggtacgcttgtttgggcagtcccgaatcatgtgcccaaaccctctgcaacgatggcactgaatatcccgtgtacgtcctgtggaagaagcggcgcctttggcagggggcgctactggcttggtcgtccctgtgcgcgatgtagtgctaggcgtagaaggtgcagggctggaaggagttgagctgtgtgttggaccccgacctgcaaaagagttagtatatgtctttgatcgtcgtccctgcacttcacgttcagctttgcaagcatattcaaacaatgtggttatatcaaaataatccttataatcaagtatatcctgaatttccctgttcaaaccaccacgaaaacgcgccacagcagcgtcatccgactcaaccaaaccacaacgaagcatacccttttgtaactcctggtaatattcctcaacagattgtgaaccttgttgaaaacgctgcattttgttaagcaaatcacgagcataataggaaggaacaaatctgtggcgcatgacagtttttaattgggtccaagtaatgacactgttaatgggaagtttttgtttatactcacgccaccaaattaaagcaaaatcagtaaattcactaatggcagccttcacttggctattagcaggaatatcatggcataaaaatttctgttctacctctaattcccaatcaagatatgcagcaggatcatatttaccattaaaagatggaattttaaatttaatcttagaaaataagtcattagggggatgacaaaccacacgacgtgcacgaccacggcgatctccatcgtcctgctcagtgtcaccgcctgctccatctttgtggtcaatgcatcaaggcgtgccaggatggtgtcgagtgtggtgcgagtcgccgtttgagcaaggtcaagttggttgaaacgctcggtcgtcgaagtgatcgttgaatcaagccgttcatgcatcgtcctaatgtcagcagcaagtccatcaacttgtccccttacttcctgcaactgggcatccaccatgtcgtgtgctcctgccatagttagcgtaaacaccaaaacaccaaaaggagaaaaaccgacgaaaacaggggaatggtggtgacaacttgctcgctcgatggaatgctgttatcaagttcttatacgttcttaccaagccacagtggtgaactgcaatcaacaagtggaaccggtgaaagattggatgagcgattgcgtggagaaacagaaacctgctcgtcgtagaaatatgtggagttctgggtaggctgcactctagtcaaggattagcacgatctaacaataatgcaaagttgaattatagtgcaaaacacgaaactatattgttggccacaggtgcaaaggatggatggaactagcagaatggcagtaccgtaaatattgtactagtgatgccaaaaaggcactagtagaaatcacaggtgattttgtttttcttttttgtatgatttttttgatatttttctcagcacaagaagcaacaagataggagctacacgaagtttcacctaaaacagatatcagatgtggtctatagaaaatcaggaagttctctgaaaagcgttcgagaactttgatgaatttttttctttattttccagaatttttttgacaattttgtcgaaccccaaacagaccgtaggtgagtttggccggcctcagaatggtgtcaacaatctcctgtaaaaatttcagattttttggacacccgagcgaaaagttatgcccgttttacggaaggtacctcaagttatgttttaaaaacgaccaggatgaaacaaccgtatcctttctccttcgttttctttttttttgtttctgtttttttacgtaaccgaaggagaaaaacaaggaagcggtcgttgactcggtttgttttttttctgtttttttttcgtaaccgaaggagaaaatcaaggaaacggccgttgactcggtttgttttttctgtttttttacgtaaccgaaggagaaaaacaaggaaacgatgttgactcggtttgtggcgtgatcaaacgggagatggtggcggcgctagggtttgaatggtggaagaacacaatgcaaccaacaacaaatgacgcgaaagcacacaaattcaacaatgcagattattgaaagaaagtgcgaggttcaaaagggtgctgggataagatctaacctgaatttttatgtggttttgtggactgtaggaaaaaaaacactcgataaactcaccgatcaacctggaaatctgataccaattgatgtagctgaggtgcccgatctttcggcgagtagagataatttcgatttggcggaagatgacccttgcgatccgactacgacgagcaagcctgaggcgccaatgcaatcgctgaaccaactccctgtggttaccgaccttgctgatgcgagatcggcctgatcacgaagattgtttcctgtgcgcaatcgaagaacgaacaagaaaaagatgcgagcaatctaatctattactcgagggtggagttctgaatacacgaagacagtgcagatttgcgcgtgttcgagagtagctaaggctaacgtaaaacaaaactcgaaaataaaggaggcgcagctcctggataaatagagggggcgcagcccctaggggcggccaaccctaggtcgtccattatgggccgcagttgggctggtcgtctattcttctgggccctcattcttcagtagtatgacgaagttaagatctctggcacgggcccgagtgattggcccagctaatgaaggaagtggcgcttgatgtggaggtgctgctggtgtagtcgtactcatagtgatgtcctcatcagagtactcatcagccagcgatttagataatgatacatatgccatgcttgctgcccaagatgctgaaaaggagaatgatgatgaagagcatattggggctgaacatgctgaacactatgagagcctcgttgtaagatgtgtcttgagtgctcaaattattaaagctgaacaaaaccagcgacacaattgttccaaactaaatgtgtagttttggaacgatcttgtcgtattataattgatggaggaagctgcaacaacttagcaagcaccaccatggtagagaagcttgggctgaaaacgcttccacatccacacccctactacatccaatggttcaacgatagtggtaagcttaaggtaacacgtatggtccgtgtggaatttacaattggttcataccatgattatattgattgtgatgtggtacccatgcaagcttgctctatgttatttggtagaccatggcaatttgataaggacaccgtgcatcatggtaaaacaaatcaatactcttttatgcataatgagaagaagcttgttttgcaccctatgtcccccgatgctatcttgaaagatgaagttgctagagcatgcaaagagaaaaacaaatctgttcataataacaatctagatgttacaaaggaattggtacaacctaagagtgataattctaaatctgctcatgtaaggaaaaatgaaatacaactgaaaagtgcttgtttccttgcttccaaatctgatttacttgaattaaacgatgttgatgcaatctgctatgtgtttatatgcaaggatgctttgttctcacttcacaacataccatctactttgccttctactatcactaatcttttgcaggactatgctgatgtatttccaaaagaagtgccacctgggctgccaccgataagaggaattggacatcagattgacctcatcccaggggcttccttgccaaaccgagcgccatacaggacgaacccagaagaaaccaaggagattcagcgataagtacaagaattgctcgataaaggttatgtgcgtgagtcccttagtccttgctctgtccctgttttactagtcccaaagaaagatggctcatggcgcatgtgtgtagattgtcgagcaattaataacattaccatcaggtatcgtcatcctatccctaggttagatgatatgctggatgaacttagtggctcgatggttttctctaagattgacttacgtagtggatatcaccaaattcgcatgaagctaggagatgaatggaaaacagcatttaaaaccaagtttggtttgtacgagtggttagtcatgccttttggtcttactaatgcacctagtactttcatgagattaatgaatgaggttttacgtgctttcattggaagatttgtggttgtctactttgatgacatcttgatctatagcaaatgtctagtagatcatcttaatcatctacgtgctgtttttaatgctttacgtgaagcacacttatttggtaaccttgataagtgcacattttgcacagaccgtgtctcttttcttggctatgttgtgacaccacagggaattgaagttga

SEQ ID NO: 643 - DNA, 9602 bp, Zea mays
  source (0)...(0): Zea mays BAC clone full insert sequence contig bacm.pk108.h15-2.fis40
  misc_feature (1)...(9602): n = A,T,C or G
tgtataattattttctaacccttaaaaatgaaagaataatgattcgaacgaccatgatgcaagctatcagtatcatattgccaaggtcgaccaagtaacaaagagcatgcttccatgggaataacatcacaatcaacaaaatcagaataagcacccatggagaaaggaactcgcacggaacgcgtgatttttattttaccaccatcattaagccattgaatgtgatatgggtttggatgcttacgagtgggtaacgacaacttttcgaccagcatggtactcgccaaattgttgcaactgccgctgtcgataatgatgcgaattgaccgctcctgcacaacaccctttgtatggaacagagtgtgtcgctgattcttctcgggcaaagcgacctgtgtactgagaacacgctgcacaacaagactttcatacctatcagcgtcgcccgggttgacatgtacctccgccttagctgcatggtcagtggcaagtagtgcatgttcaatttcttcagaatcactagcggaagagtactcaccatcgtcacgaatgagtaaagtgcgcttgtttgggcagtcccgaatcacatggccaaatcctctacagcgatgacactgaatatcccgtgtacgacctgtgggtggggcagcgctggctggtttggtcgtcttctcgcgtggagtagtggtggacgtggatggcgcagggggaactggtgctgaggtggatgtcgagcttcgtcctgcaaaagggttagaatattgcttcgagcggcgtccctgcacttcacgttcagctttgcaagcatattcaaataaagtagtcatatcataatattccttataatcaagtatatcttggatttcgcggtttaaaccaccacgaaaacgtgccatagcagcgtcgttgtcctccaatatcccacaacgaatcatacctttttgtaactcctggaaatagtcctcaacagattgagaaccttgctgaaaacgctgcattttattaagcaaatcacgagcataatacgaaggcacaaatcgatgtcgcatcgcagctttcaactgatcccaagtggttggaatggtagtgggatgttttattttaaactcacgccaccaaattaaagcaaaatcagtaaattcactaatagcagctttaacctgaaaatgtgcagcaatatcatggcatgaaaatttttgttcaacctctaactcccaatcaagatatgcagcaggatcatatttgccattaaaaggtggaattttaaatttaatcttagaaaataagtcattagggggatgacgaaccacacggcgtgcacgaccacggcgatctccatcgtcccactcagtgtcaccgccgtagtcctgctccatctttgtggtcaacgcatcaaggcgtgccaggatggtgtcgagtgtggtgcgagtcgccgtttgagcaaggtcaagctggttgaaacgctcggtcgtcgaagtgaccgttgaatcaagccgttcatgcatcatcctaatgtcatcagcaagtccatcaacttgtccctttacttccagcaactgggcatccaccgtgtcatgtgctcctgccatagttagcgcaaacaccaaaaaaacgacaaaaacaggggtgtactgctcacaaggcgctcacactagtgctgttatcaaattcttatccgttcttaccaagccacagtggtgaactgcaaccaacaggtggaaccggtgaaagattggatgagcgattgcctggagaaacagaaacctactcgtcgtagaaatatgtggagttctgggtaggctgcactcaagtcaaggattagcacgaccaaacaataatgcaaagttgaattatagtgcaaaacacgaaactatattgctggccacaagtgcaaaggacggatggaactagcagaatggcagtaccgtaaatattgtactagcgagaccactagtaggaatcacaagtgattttgtttttcttttttgtatgatttttttgatatttttctcagcacaagaagcaacaaaataggagctacacgaagtttcacctaaaacagagttcaaatgtggtctacagaaaatcagaaagttctctgaaaagcgtgcgagaactttgacggatttttttctttattttcctgaatttttttgacaattttgtcgaacccaaacagaccgaaggtgagtttggccggcctcagaatggtgtcatctagctcctgtaaaaatttcagatttttcggacacccgagcgaaaagttatgcccggtttaaggaaggtacctcaagttatgttttcaaacgaccgggatgaaacaaccgtatcctttctccttcgttgttttttttgtttctgttttttttttgacgtaaccgaaggagaaaaacaaggaaacgatgttgcctcggtttttttttctgttttttttcgtaaccgaaggagaaaaacaaggaaacggacgttgactcggtttgttttttctgttttttttttgacgtaaccgaaggagaaaaacaaggaaacaatgttgactcggtttgtggcgtgatcaaaggggagatggtggcccagctaatgaaggaagtggcacgggctcgagtgctgctggtgtcgtactcatagtgatgtcctcatcatcctccccttcttgaagtgaagtcgtcctcgacgacaactcctcatcctcggccatatatggtttcaaatctgcaacattaaaactagtggaaacaccaaattccgcaggcaggtcaaggatataagcattattattaatctttgttagcaccttaaaaggaccagcagcacgaggcattaatttagaactacgcaaagtaggaaaccgatcctttctcaagtgcaaccaaaccatatcacctggctcaaaagtaacatgttttcttcctttactaccagcaacctgatttttagcattagtagcagcaatgttctgtttcgtttgttcatgtatggtaatcatttgttcaacatgtgcagcagcatctacatgtggggcgttcgcagcattaagtgaaatcaaatcaataggtgccctagggatgtaaccataaacaatctggaaagggcacatctttgtagaagaatgcgtggcatgattgtaagcaaattcaacatgaggcaagcaatcctcccaacgtctcaaattcttgtctaaaacagccctaagcatggtagataaagttctatttactacctcagtttgtccatcagtctgagggtgacaagtagtgctaaacaacaatttagttcccaatttattccaaagagatctccaaaaatggcttagaaacttagcatcgcgatcagagactattgtttttggaataccatgtaaacgaataatttctctaaagaacaattcagcaacaatgctagcatcatcagttttatgacaaggtataaagtgagccattttagagaatctatcaacaaccacaaaaatactatccctccccttcttagttctaggcaagcccaaaacaaagtccatagagatatcaagccaaggagaagaagggacaggcaaaggcatatacaaaccatggttgttcaaccgtgacttagctttctgacaagtagtgcagcgtgcaacaaggcgctccacatcagcgcgcatccgaggccaaaagaaatgggcagccaacacctcatgcgttttgtagacgccaaaatgccccatgagaccgcctccatgcgcttcctgtaacaacaaaagacgaaccgagctagctggaacacacagcttgttagcgcgaaacaggaacccatcctgtatgtgaaatttgccccatggtatcccattaatacaatggccgaaagcatctttaaaatcagcatcgtcaacatattgatccttcatagtgtccaaaccaaagattttaaaatctaattgtgacagcatggtatagcgacgagacaaagcatcagcaataacattgtccttcccgttcttgtgtttaataatgtaaggaaaggactcaatgaattcgacccatttagcatgacgacggttcagatttgtttgggtacgaatatgttttaaagcctcatgatcagaataaattatgaactcacgatgccaaagatagtgctgccaagtatgcaaagtgcgcactaaagcgtaaagctccttatcataagtagaatatttcagactagcaccgcttaatttttcactaaaataagcaactggttttccttcttgtaacaaaacagcacctagcccaataccgctagcatcgcattcaagctcaaaaactttattaaaatcaggcaattgcaagaggggagcttgggttaacttatctttcaaagtgcttaacgctacctcctgcgaatcactccaagcaaacggcacatctttctttgtaagctcatgtagaggcgctgcaatggagctaaaatcacgaacaaatctgcggtagaaaccggcaagtccaagaaagctccgaatttgtgtgaccgtcgtcggtgtaggccactcccgaatggcagcaatcttgctgctatccacctcaatgccctgcggagtaaccacataaccaagaaacgagacacgttgcgtgcaaaatgtgcacttttccatgttaccaaacaagcgagcagcacgcaaagcgtcaaaaacagcacgcaaatgttctaaatgctcctctatagacttgctgtaaataaggatatcatcgaaataaacaacaacaaacaaacctatgaaggcccgtagaacttcgttcattaaacgcataaaggtgctgggagcattagtcaatccaaatggcataaccaaccattcatataaaccaaattttgttttaaaagccgttttccattcatcaccgagtttcattctaatctgatggtaaccgctacgcaaatcaaccttagagaaaataacggcaccactaagctcatctagcatatcatcaaggcgtggaataggatatcgataacgaactgtgatgttattaatagcacgacaatctacgcacatacgccatgacccatctttctttggaacgagtaaaacaggaaccgagcaagggctaagagactcacgaatgtaacccttatcaagcagcgtctgcacctggcgctggatctccttcgtctcatctggatttgtacggtacggggcgcggttcggaagagaagcgccggggatgagatcgatctgatgctcaatgccacggaggggagggagacccggtggtaagtccataggataaacatcagcatactcctgcaaaaggttaacaacagcagggggtatatccaaagacggtgcatcatcaagcggaacaagcattcgcgagcatacaagtgcataacagggcatatgagcttcatggagatcatcaaaatcagcacgtgtagcaagtaaaacaggagagtgcaacttgatttcagatttaataggtgcggctgatgtcgatttgacttgttgtgcagttttagcagccctagtaagatcatctttcaaaatttggtcaggggtcattggatgtataattattttctggcctttaaacatgaaagaataatgatttgaacgaccatgatgtaaactatcagtatcatattgccaaggtcgacctaataacaaagagcatgcttccataggaataacatcgcaatcagcataatcagaataagaacccagcgaaaaggggacacgtaccgaacgtgttacctttattttaccaccatcattaagccattgaatgtgatacggatgtggatgtgtgcgagtgggcaaggataatttctctaccaacgctgtacttgccaaattgttgcagctgccactatcgatgatgatgcgaatcgactgttcgtgcacgacgcccttggtatggaatagagtgtgtcgctgatttttttcggcctgggcaacctgtgtgctgagaacacgctgcacaacaagactctcatacctatcggcgtcgatgggatcaacgtggacttcctcattttctgcatggttagtggcaatcatagcatgactagtttcctcagaatcactggctgaagagtactcaccattgtcacgtataagcaaggtacgcttgtttgggcagtcccgaatcatgtgcccaaaccctctgcaacgatggcactgaatatcccgtgtacgtcctgtggaagaagcggcgcctttggcagggggcgccactggcttggccggccctgtgcgcgatgtagtgctaggcgtaggaggtgcagggctggaaggagttgagctgtgtgttggaccccagcctgcaaaagagttagtatatgtctttgatcgtcgtccctgcacttcacgttcagctttgcaagcatattaaaacaatgtggttatatcaaaataatccttataatcaagtatatcctgaatttccctgttcaaaccaccacgaaaacgcgccatagcagcgtcatctgactcaaccaaaccacaacgaagcatacccttttgtaactcctggtaatattcctcaacagattgtgaaccttgttgaaaacgctgcattttgttaagcaaatcacgagcataataggaaggaacaaatctgtggcgcatggcagtttttaattgggtccaagtaatgacactgttaatgggaagtttttgtttatactcacgccaccaaattaaagcaaaatcagtaaattcactaatggcagccttcacttggctattagcaggaatatcatggcatgaaaatttctgttctacctccaattcctaatcaagatatgcagcaggatcatatttaccattaaaagatggaattttaaatttaatcttagaaaataagtcattagggggatgacgaaccacacgacgtgcacgaccacggcgatctccatcgtcctgctcagtgtcaccgccgtattcctgctccatctttgtggtcaatgcatcaaggcgtgccaggatggtgtcgagtgtggtgcgagtcgccgtttgagcaaggtcaagttggttgaaacgctcggtcgtcgaagtgaccgttgaatcaagtcgttcatgcatcgttctaatgtcagcagcaagtccatcaacttgtcccctgacttcctgcaactgggcatccaccatgtcgtgtgctcctgccatagttagcgcaaacaccaaaacaccaaaaggagaaaaaaaccaacgacaaaaacaggggtgtactgctcacaaggcgctcacactagtgctgttatcaagttcttatccgttcttaccaagccacagtggtgaactgcaaccaacaggtggaaccggtgaaagattggatgagcgattgcctagagaaacagaaaccttctcgtcgtagaaatatgtggagttttgggtaggctgcactcaagtcaaggattagcacgatcaaacaataatgcaaagttgaattatagtgcaaaacacgaaactatattgctggccacaggtgcaaaggatggatggaactagcagaatggcagtaccgtaaatattgtactagtgatgccaaaaaggcactagtagaaaacacaggtgattttgtttttcttttttgtatgatttttttgatatttttctcagcaaaagaagcaacaagataggagctacacgaagtttcacctaaaacagatatcagatgtggtctatagaaaatcaggaagttctctgaaaagcgtgcgagaactttgacgaatttttttctttattttcctgaatttttttgataattttgtcgaaaccaaacagacaattttgtcgaaaccaaacagggctcagaatggtgtcaacaagctcctgtaaaaatttcagattttttggacacccgagcgaaaagttatgcccggtttacggaaggtacctcaagttatgttttaaaaacgaccgggatgaaacaaccgtatcctttctccttcgttttctttttttttgtttctgttttttttatgtaaccgaaggagaaaaacaaggaagcggtcgttgactcggtttgtttttttttctgttttttttgtaaccgaaggagaaaatcaaggaaacggccgttgactcggtttgtttttttctgtttttttttgacgtaaccgaaggagaaaaataaggaaacaatgttgactcgatttgtggcgtgatcaaacgggagatggtggcggcgctagggtttgaatggtggaagaacacaatgcaaccagcaacaaatgacgcgaaagcacacaaattcaacaatgcagattatggaaagaaagtgcgaggctcaaaaggtgctgggataagatctaacctgaattttaatgtggttttgtggactgtaggaaaaaaaacgctcaataaactcaccgatcaacctggaaatctgataccaattgatgaagctgaggtgcccgatctttcggcgagtagagataattccgatttggcggaagatgacccttgcgatccgactacgacgagcaagcccgaggcgccaatgcaatcgctgaaccaactccctgtggttaccgaccttgctgatgcgagatcggcctgatcacgaagatcgtttcctgtgcgcaatcgaagaacgaacaagaaaaagatgcgagcaatctaatctattactcgagggtggagttctgaatacacgaagacagcgcagatttgcgcgcgttcgagagtagctaaggctaacgtaaaacaaaactcgagaataaaggaggcgcagctcctggataaaatagagggggcgcagcnccctaggggcggccaaccctaggtcgtccactatgggccgcagttgggctggtcgtctattcttctgggccctcattcttcagtagcatgacgaagttaagatctctggcacgggcccgagtgattggcccagctaatgaaggaagtggcgcttgatgtggaggtgctgctggtgtagtcgtactcatagtgatgtcctcatcaaagctcctccgaagccgaggtcgagtctgtcttccgtggctgaggtcgagtccgagcccctgggtcgggcgaggcggaggccgccggctgaggccagggcggagtccgagccctggggtcgggcggagcggagttcgccgtcttctagggcttagcccaagtccgagccctgggtcgggcggagcggagttcgccgtcttccgagacttagcccgagtccgagccctgggtcgggcggagcggagttcgccgtcttccgggacttagcccgtgtccgagccctgggtcgggcgaagcggagtttcctatggtgccttcggcagggcctgaccgcctgtcagtctcactctgtcaagtggcaccgcagtcggagtggcgcaggcggcgctgtccttctgtcaggccggtcagtggagcggcgaagtgacgacggtcacttcggctctgccggctggggggcgcgcgtcaggataaaggtgtcaggccacctttgcattaaatgctcctgcgatttggtcggtcggtgcggcgatttggtcagggttgcttcttggcgaagacagggcctcgggcgagccggaaatatgttcgccgctggaggggggcctcgggcgagacggaaaccctccggggtcggctgcccttgtccgaggctaggctcgggcgagcg

SEQ ID NO: 644 - DNA, 9646 bp, Zea mays
  source (0)...(0): Zea mays BAC clone full insert sequence bacm.pk108.h15-2.fis41
ttaaaataaaacgcgaggtcgacggtatcgtttccccttgatcaccttgacacggggcgactcatgcttggtgaagcggttcagataatcaacaggcgagacttagtgctcgaaaataaggaaaaacacggctccgtgccgaaattacatacatgttcaggcctcgacagccacaatgaacaaaaaacactggcattcgaagtgccattacaaacggaactccggttcccctccgcaggtacgaacaaccccactccgagggggaaggcctgcggagcaacagaagaatgatgagcggctcgctgccgcccgttctaaccatgacgacaaccacccccgccccgggcagcgaagcggcttaggcagcggcttcggggcaggtgccacgacaggagggctctcccccgctgaggacgagaaccagccattcaggccgggaggcggagacccagggccactggcgccctacctgtcccgacatggctggaggaagtccccatgggactcaaggacgccattctcccccaggcatggggagaagaaaaaggcagccgactcatgcgggggcagccccctgactcgcctcatcttccatcttggcctggatgacgaaaatccttgaggccgagggaggagtagaggccgcagcctggcccgctttccccaccgtcgaactggaggtcaccatcttgggtgaccgccggtggcggggtgcggccaggctgcgtgatgaaaatccttgaagccgaacgatggctgagaggtaccaactcccatggagttgcgttcctccaacgaggaggcggaaaggcggcggataccccccatccgggggcttggaagatggaaagacacgacgcataagggaggaagaaaacatggttgccttctgaaaggagtctccctccttttaaaggcaactctccctacgtgcgcccccagacgccacgagctgagtcttctccaacacgctccaaggccctcccctgcggctcggggggctgggtcccgcatgtcatgcaaaccggctcagagtagaagaagccaaaccgccgcgcgtggtgcgcacaaccgcccagcggttacaagcgaccccccacttttgcccagaccaacgggcggaaggggcgggcagccatgcaggcggcatgcaaccgcgccaggtggacgcgcttctccgacttctgacacgccagcttggaggcccaggcccacgcgtcaagcaaccggcgcgccagttgctgcatgcaagcaaccgcaccgccacttgtgccaccgtcgcacctcttcgattgcggagcctgtgccgcgactcgaggcgacccagcgcgcgacccagcagcgccagcctggcgcgttggtcaaagcggccgaaagtgggccggcagtaatggcggtggcaggcgggcgggcgcagcagtcacgtcgtcagccaggctcacgtcccatcctgggacagcaagagagcctcctcccacggcgtgaagacggtgcacccgtgatccgttcctcgaacggctcgcgcacgcgtaacggccgccccgccaaccactcgccccgtcgcattaactccgcggcgggacgggcggcgattctggcaggagaagcggacgacgcttcgccttcgccgcaataaccgcgtcaaaaaaggtacgccacgtcgtttgatttcgtatccttttcctttttcctctttctctatctcttgcaatagggaccgggaaagggggataccccgaaaaggatccttctctgcgaaggaaccgggctccgagcccctccctactgatcagaggttcgaagactggccctccgaagggttcaacagtcgcctcagatcgcgtgggcccgacacccactactggtcaggggttcgaaggccagccccccgaagggttccatggccgcctcaggctactcaggctccgcgcccactactgatcaggggttcgaaggctggcccccaaagggttcacagtcgccttagacaccgagcgagggatgaccaggggtacgttcgatacataaccgaggctcgggctgcgctcccgaggtaccctaggacatttccgagaccagcgggagcgatcttgtaacggaatcccatcggagggaggcatcgagccctcggaccccgtcgccaggggaccgggtccggcaaatcacccgcaggtacttttgggcgtgcctctgggcccctagccgacccccaacgaacggggcacggacgtccactcggattacccgcttgcagctcaccggagacaccatgttcggtgcccatcgagggtaacatggcgcactcccccccctcctccttgtggaaaggcgacgtaggggcgtatgtaaaaaagccgagtctgtccctgatcgtcctctcgccctgtgcagaggctcgggggctgctctcgcaaacccggctccggccaaaccgttgacagcgtcaacataccagcccgagagcttgggccccgaccgtgcacccgggctacggccagttcgcatgagggaacgaccagaccagccgaagcattacgcaaggcattaagacctcgaaggagtgtaaccactcctccgaggcctcgggggctacaccccggcgggtgcgctcgcgcgcacccaccggaacgaaatgcaaccgagaaaggctggtccccttgcaaaaaagtgcgacggaagcctccaagcgagtgctatcactcccttcgaggctcgggggctactgtcggggaccataattaggggtaccctcaagacgcctaattctcagctggtaacccccatcagcataaagctgcaaaggcctgatgatgtgcacccgttgggtgattgcccgatctttcgatgagagggtgtggaataactcgattgggggaggagacgacgttcacggcccgactacagccttccaaagacgctgcgccttagcaaccgatacaccacctcctatggctgtcacgatcttgtggagcgtgacaccctggccactagggcactcgtcctgcaagcaatcgaagaactagcaagaacaagtagaacaagtactgaattaccagatctaaatgtaggtttaaagatcaaactacaatatggtggggttccgaagacaagaagacgggcggctgaactagcacgcgcgcttgcaagcaagtagcgagagctaaacttgatctaaacaaaacccgctgttcttggtggcggctagggggtttataaacatgggaggacgaccacaagggtattggggtcgtgctgcaaccctaggatgcgtccctaatggacctaacttgatacacgacccattgggccaaaatagggtgacgcagcaccatgggcagaaaaggcaggaaatgtctcggtaagaaaacaatgattacggcggcctcagaacagatatgactataattccggatccatatgaaagtagacttgataagctttccatgttgtgcttgaacattccaatccgagcccgcatctgaccgtggtgaccgtcacaagttggtgttcttctgcagtccgaatccagcatgttcaaatccttttccctttcggtcttctccctgattcctaagcaaaacaagagtgcacgggtctccatggtctaaatatgatggacatgaactcaagagtgtaatcacctgatggttgagttgacgagcacgagcgcgagtaatgggaccagaaattggtacttgtattggtatagatgcatcagtagtgtggatgtcttcatcattctccccttcttgcatttgagtcgtcctcgactcaagctcaacttcctctcccaagtagggctttaaatctgcaatgttaaatgtggggctaaccccaaagtctgcaggcagatctagcctatatgcattgtcgttaattttctctagcactttaaacggtccatcggctcgaggcaacaatttagattttcgtaattcaggaaacctttcctttctcaaatgcaaccaaactaaatctccaggttcaaaatttatttcctttctacctttatcactagcaaacttatatctagcattcatacgctctatgttttctttagtagtttcgtgcagttttaacatcaattcagcacgcctagtagcatcaaaatttagtttttcagaagatggcaaaggcattaaatcaataggagcacgaggtaacaaaccatatacaatctgaaatgggcacatctttgtagtagaatgcaatgatcgattataagcaaattcaatatgaggcaaacagtcctcccacatcttaatattcttctttagaactgcccttaacatagtagacaaagttctattcacaacttcagtttgaccatcagtttgaggatgacatgtagtagaaaataaaagcttagtccccaattttgcccacaaagtcctccaaaaatgactaagaaatttagcatcacgatcagaaacgattgtgttgggcacaccatgcaagcgaacaatttcacgaaagaacaaatcagcaatatgagtagcatcgtcagttttatgacatggtatgaaatgtgccatcttagaaaatctatcaacaaccacaaacacactatcacgtcccttcctagtcctaggcaatcccagcacaaaatccatagaaatatcttcccaaggagcactaggaacgggtagaggcaaatacaaaccgtgtggatttaaccgtgacttcgccttttggcatgtcgtgcaacgagcaaccaatctcaccacatctcttctcatcttgggccaaaagaaatgaccagcaagtatgtcctccgttttctttgctccaaaatgtcccattaagccacctccatgtgcttcctgtaacaacaacaaacgaacggagctagctggaatgcatagcttgttagctctaaacacaaacccatcactaacgatatatttgttccatcctttcccatctttacaatgcagcaacacatctttaaaatcagcatcatgaacatattggtctttaatcgtctctaatccaaagattttgtagtcaagttgattcagcaaagtatatctcctagacaaagcgtcagcaatgatattctcttttcctttcttgtgcttaataacataaggaaacgattcgataaattcaacccacttagcatgtctacggttcagttttccttgactacgaatatgtttcaaagattcatgatcagaatgaataacaaactctttgggccacaaataatgctgccatgtttctaatgttcgcacaagagcatataattccttatcataagtagaataatttagaacagacccactcaatttttcactaaaatatgcaacaggtttgccttcttgtaacaaaacaccacccaatccaattccactagcatcacattcaagctcaaaagtcttattaaaatcaggaagttggaggagaggtgcatgtgtcaacttatctttcagcacgttgaaagcgtgctcttgtactttgccccaactaaaatgcactcccttcttcgtaagctcattcaaaggtgcagcaatggtgctaaagtccttcacaaaacggcgatagaagccagcaagtcctaggaaactccgcacctgtgtgatagtctttggcataggccatccatgtatcgcttctaccttggcttgatcaacctcaattccctgtggagtcacaacataaccaagaaacgaaactcgatcggtgcaaaatgtgcacttcccaaggttaccaaataaacgtgcatctcgtaaagcattaaaaacagcacgcatgtgatcaacatgttcatccatagatttgctgtagatcaatatgtcatcaaagtatactaccacaaattttccaatgaaggcacgcaaaacctcgttcattaatctcatgaaagtgctaggtgcattagttaacccaaaaggcatgactaaccactcatacaatccgaacttagttttgaaagcagttttccattcatctcccaatttcatacgaatctggtggtacccactacgcaaatcaactttagaaaacacaatggcaccactcaattcatcaagcatatcatctaaacgtggaatagggtgtcgataacgtatcgtgatattattaatagccctacaatcaacacacatacgccatgttccatcttttttaggcactaaaataaccggaacagcacacggactaagagactcacgcacgtaacctttgtcgagtagttcttgcacttgtcgctgaatttcttttgtttcctctggatttgtcctatatggcgcacgattcggcaaagatgcaccaggaataagatcaatttggtgctcaatccctcgtataggtggcagcccctctggtatctcacttggaaatacatcagaatactcctgcaaaatgttagtaataacaggaggcaaagaatgctgcatatcttgaattgaaatcaaagcatccttgcataccaaggcgtaggcaacagtagtggaagcaaataattcattaacatcagtttttgttgcaagcaagcaatgtcctttcaattttatcccatctttgttattaccaacaactttaatattcttgttgttctcagttttagctttggtagctttagcaacatcatcacgcacaatagcctcaggggacatgggaagcaaaataattttcttatcatggtatatgagagaatattgatttgatctaccatgatgcatacaatctgaatcaaattgccatggtctacctagcagaatattacaagcatccataggcacaacatcacagtcaacaacatcacgatatgaaccaatagcaaaattaattcgtaccagcttggttaccttgaccttaccactattgttgagccattgaatgtgatatggatgcgggtgcggtttggtcgtaagtgcaagcttctccaccatgtcgctgctagccaagttgttgcagctacctccatcaatgatcaaacgacatgaacgctccttaatgacacactttgtttgaaacaacgtatgtcgctgattctgctctgccttctccatttgtgcactaagcacacgctgtacaatgaggctctcataatgctctgcatcatctgcaccaatctgttcttcgggtggttccttagtgcctacatcatcagccgcaagcaaagcaagtgtagcttcatccaaatcactagcagaggaatacccaccatcgtcttttaccaccaaaacatgctgattaggacaataacgctgcacgtgtccatagcccttgcatcgataacacagaacatctcttgttctacctgtggaagctactgaagaggcactacctgcgggtttctgggcagatttggttgctgaatttgtggaagatgcacgtggtttgtcgctggaggaaggcgggggtgctggtcgacttggcgagggagttggtgctagtgtacggccggtcatggatgtagtcgtgcgctgttgccatggtgtagattttcctgcagaaacattagaccttgcactagcacgtcgtccctgcacttccctttcagctttgcaagcaagatgaaacaatcgggttacattagcataatctttataagcaaggatgtcctgaatttccctatttaacccgcccaaaaatctagccatagcagattcctcaccctcctctatgttacaacgcagcatacccatttgtaattcctgataatattcttctacacttttagtaccctgtctcaattgttgcaacttgtttaacatatcacgtgcataataagaaggaacaaatctagcccgcatgacccgtttcaacgcatcccaagtttgtggcatgttattaggattcttcttaccatgttctatccaccaaacagaagcaaattcagtaaactcactagtagcagctctaacccgcgcattctcaggaaattcatggcatgcaaacttttgatcaaccgcaatctcccaagtaatgtaagcatcagggtcatatttaccatcaaaaggaggtattttaaatttaaccttactaaaagcatcatcattaccatgtacctcacgtcggcgaaaaccacccatacctctacggttagtacgtagtcgccggcgattaggtgcttcttggtcatcttgttcagtatcagcaacatagtcatcccagttaccttcggcgccttcatcacgcccaccattgatattagcatgcatctcatcaaaccgcctcaagagtgcgacaaggctcttgtcaatatgagcaactgtcatttccacatttgcaagtttggtgttcgtgtcgatctgtgtggcctccaattgccccatcttttcattcgtcacctgcatgtcattatcaagaccttccgtgtgcgtcttcaccagccttacaaagtgttgtatgatacccttggtgcgaggagagtgtggcatattacgagaagcatcatcaacctccaatcctgccatggttagacgaacagaggcaacaagaaaaaaaacgtgaaggaatgaaaactctacaactattaggatgtagctactgcaaggcgctcactctcaacctgccacacaagctcttaccaattcttaccttgcacaacaggaggggtcagcaaccaacaagtctgcaaccgtggaataagtgtattggtgccgcagcaacacgacctgtcaaactgtagtcgaaatatgtagagttgtaggtgggctgaagcaaggaatacactagtaccacgttagttacaaaagcaagctgaataatcgttcaacggtggtactgtgctggtcctaggctaaaccaggctagagacgtgagcctaggcacaaaggtagtcactgaaaaagaacaactagcacagcacaaagagaattaacagattaagagattcagcccccttcttcttcttttgcttttttttcttttctattcttttttttcttcttcttcttctgttttttttgcaggggcctaaacccttttttttactatgacaacccaaacaataaagatattgctaacagcccctttaaatcagatttaacaaatcttgttaatatagaaagtccagaaatctctacgatgattgcggagcgctcagaacgaattttgagataaggtcagatccgttggaaagaagataagataagctttccagattgtatttaaacttccaaatcggatatgatatgtatccgtggtggcaaaaacgaaccagagatgtttttggtgatggtggatctcgtggtgaccaaaacgtggtagaactcaaaactctaaaggaataaactaagaccagcaactcgacacaaccgatgcaaccaaaaactcaacaagccctaactaagtagtactagtaaatgctcaatggtttataggattgcggtaaaactaatctactattttttggctttttctggactataggagataagaaaacagcgaagaaaagtaaatctctcaccgataaaccttgctttgataccaactgatgtgcacccgttgggtgattgcccgatctttcgatgagagggtgtggaataactcgattgggggaggagacgacgttcacggcccgactacagccttccaaagacgctgcgccttagcaaccgatacaccacctcctatggctgtcacgatcttgtggagcgtgacaccctggccactagggcactcgtcctgcaag

SEQ ID NO: 645 - DNA, 12541 bp, Zea mays
  source (0)...(0): Zea mays BAC clone full insert sequence contig bacm.pk108.h15-2.fis42
tcacttgtgattcctactagtggcctcgctagtacaatatttacggactgccattctgctagttccatccgtcctttgcacttgtggccagcaatatagtttcgtgatttgcactataattcaactttgcattattgtttgatcgtgctaatccttgacttgagtgcagcctacccaaaactccacatatttctacgacgagaaggtttctgtttatccaggcaatcgctcatccaatctttcaccggttccacctgttggttgcagttcaccactgtggcttggtaagaacggataagaacttgataacagcactagtgtgagcgccttgtgagcaatacacccctgtttttgtcgtttgtttttctccttttggtgttttggtgttgcgctaactatggcaggagcacacgacatggtggatgcccagttgcaggaagtaaggggacaagttgatggacttgctgcggacattaggacgatgcatgaacggcttgattcaacgatcacttcgacgaccgagcgtttcaaccaacttgaccttgctcaaacggcgactcgcaccacactcgacaccatcctggcacgccttgatgcattgaccacaaagatggagcaggaatacggcggtgacactgagcaggacgatggagatcgccgtggtcgtgcacgtcgtgtggttcgtcatccccctaatgacttattttctaagattaaatttaaaattccatcttttaatggtaaatatgatcctgctgcatatcttgattgggaattggaggtagaacagaaattttcatgccatgatattcctggtaatagccaagtgaaggctgccattagtgaatttactgattttgctttaatttggtggcgtgagtataaacaaaaacttcccattaacagtgtcattacttggacccaattaaaaactgccatgcgccacagatttgttccttcctattatgctcgtgatttgcttaacaaaatgcagcgttttcaacaaggttcactatctgttgaggaatattaccaggagttacaaaagggtatgcttcgttgtggtttggttgagtcggatgacgctgctatggcgcgttttcgtggtggtttgaacagagaaattcaggatatacttgattataaggattattttgatataaccacattgtttgaatatgcttgcaaagctgaacgtgaagtgcagggacgacgatcaaagacatatactaactcttttgcaggtcagggtccaacacacagctcaactccttccagccctgcaccttctacgcctagcactacatcgcgcatagggacgaccaagccagtggcgccccctgcaaaaggcgccgcttcttccacaggatgtacacgggatattcagtgccatcgttgcagagggtttgggcacatgatttgggactgcccaaacaagcgtaccttgcttatacatgacaatggtgagtactcttcagccagtgattctgaggaaactagtcatgctatgattgccactaaccatgcagcaaatgaggaagtccacgttgatcccatcgacgccgataggtatgagagtcttgttgtgcagcgtgttctcagcacacaggttgcccaggccgaaaaaaatcagcgacacactctattccataccaagggcgtcgtgcacgaacggtcgattcgcatcatcatcgatagtggcagctgcaacaatttggcaagtacaacgttggtagagaaattatccttgcccactcgcacacatccacatccgtatcacattcaatggcttaatgatggtggtaaaataaaggtaacacgttcggtacgtgtccccttttcgctgggttcttattctgattatgctgattgcgatgttattcctatggaagcatgctctttgttattaggtcgaccttggcaatatgatactgatagtttacatcatggtcgttcaaatcattattctttcatgtttaaaggccagaaaataattatacatccaatgacccctgaccaaattttgaaagatgatcttactagggctgctaaaactgcacaacaagtcaaatcgacatcagccgcacctattaaatctgaaatcaagttgcactctcctgttttacttgctacacgtgctgattttgatgatctccatgaagctcataagccctgttatgcacttgtatgctcgcgcatgcttgttccgcttgatgatgcaccgtctttggatataccccctgctgttgttaaccttttgcaggagtatgctgatgtttatcctacggacttaccaccgggtcttcctcccctccgtgccattgagcatcagatcgatctcatccccggcgcttctcttccgaaccgcgccccgtaccgtacaaatccagaggagacgaaggagatccagcgccaggtgcagacgctgcttgataagggttacattcgtgagtctcttagcccttgctcggttcctgttttactcgttccaaagaaagatgggtcatggcgtatgtgcgtagattgtcgtgctattaataacatcacaattcgttatcgatatcctattccacgccttgatgatatgttagatgagcttagtggtgccgttattttctctaaggttgatttgtgtagcggttaccatcagattagaatgaaactcggtgatgaatggaaaacggcttttaaaacgaaatttggtttgtatgaatggttggttatgccatttggattgactaatgctcccagcacctttatgcgtttaatgaacgaagttctacgggccttcataggtttgtttgttgttgtttatttcgatgatatccttatttacagcaagtctatagaggagcatttagcacatttgcgtgctgtttttgatgctttgcgtgctgctcgcttgtttggtaacatggaaaagtgcacattttgcacgcaacgtgtctcgtttcttggttatgtggttactccgcagggcattgaggtggatagcagcaagattgctgccattcgggagtggcctacaccgacgacggtcacacaaattcggagctttcttggacttgccagtttctaccacagatttgttcgtgattttagctccattgcagcgcctctacatgagcttacaaagaaagatgtgctgtttgcttggagtgattcgcaggaggtagcgttcagcactttgaaagataagttaacccaagttcccctcttgcaattgcctgattttaataaagtttttgagcttgaatgcgatgctagcggtattgggctaggtgctgttttgttacaagaaggaaaaccagttgcttattttagtgaaaaattaagcggtgctagtctgaaatattctacttatgataaggagctttacgctttagtgcgcactttgcatacatggcagcactatctttggcatcgtgagttcataattcattctgatcatgaggctttaaaacatattcgtacccaaacaaatctgaaccgtcgtcatgctaaatgggtcgaattcattgagtcctttccttacattattaaacacaagaacgggaaggacaatgatattgctgatgctttgtctcgtcgctataccttgctgtcacaattagattttaaaatctttggtttggacactgtaaaggatcaatatattgacgatgctgattttaaagatgctttcggccattgtattaatgggataccatggggcaaatttcacatacaggatgggttcctgtttcgcactaacaagctgtgtgttccagctagttcggttcgtcttttgttgttacaggaggcgcatggaggcggtctcatggggcattttggcgtctacaaaacgcatgaggtgttggctgcccacttcttttggcctcggatgcgcgctgatgttgagcgccttgttgcacgctgcactacttgtcagaaagctaagtcacggttgaacaaccatggtttgtatatgcctttacctgtcccttcttctccttggcttgatatctctatggactttgttttgggcttgcctagaactaagaaggggagggatagtatttttgtggttgttgatagattctctaaaatggctcactttataccttgtcataaaactgatgatgctagcattgttgctgaattgttctttagagaaattattcgtttacatggtattccaaaaacaatagtctctgatcgcgatgctaagtttctaagccatttttggagatctctttggaataaattgggaactaaattgttgtttagcactacttgtcaccctcagactgatggacaaactgaggtagtaaatagaacattatctaccatgcttagggctgttttagacaagaatttgagacgttgggaggattgcttgcctcatgttgaatttgcttacaatcatgccacgcattcttctacaaagatgtgccctttccagattgtttatggttacattcctagggcacctattgatttgatttcacttaatgctgcgaacgccccacatgtagatgcttcggcacatgttgaacaaatgattaccatacatgaacaaacgaaacagaacattgctgctactaatgcaaaaaatcaggttgctggtagtaaaggaagaaaacatgttacttttgaacctggtgatatggtttggttgcatttaagaaaggatcgttttcctactttgcgccgttctaaattgatgcctcgtgctgctggtccttttaaggtactaaccaagattaatgataatgcttatatccttgacctgcctgcggagtttggtgtttccactagttttaatgttgcagatttgaaaccgtatgcgggagaagatgaggagttgccgtcgaggacgacttcagttcaagaaggggaggatgatgcggacatcaacaccaacacgagcacatctacaccagcagcaccttctctagcccaggcgccaccccttccacctgggccagtgactcgggcccgtgcaagagacttgaactacatcacgttgttaaagaacgaaggcccggaagaatagacgaccagcccaattgcggtccataatggacgacctagggttggccgcccctctctatttattcaggagctgcgcctcctttatttcccgagttttgttttacgttagccttagctactctcgaacacgcgcaaatctgcgctgtcttcgtgtattcagaactccaccctcgagtaatagattagattgctcgcctctttttcttgttcgttcttcgattgcgcacaggaaacgatcttcgtgatcaggccgatctcgcatcagcaaggtcggtaaccacagggagttggttcagcgattgcattggcgcctcgggcttgctcgtcgtagtcggatcgcaagggtcatcttccgccaaatcggaattatctctactcgccgaaagatcgggcacctcagctacatcagacatcactatgagtacgactacaccagcagtgatgaggacatcactatgagtacgactacaccagcagcacctccacatcaagcgccacttccttcattagctgggccaatcacttgggcccgtgccagagatcttaacttcgtcatgctactgaagaatgagggcccagaagaatagacgaccagcccaactgcggcccatagtggacgacctagggttggccgcccctaggggctgcgccccctctatttatccaggagctgcgtctcctttattttggagttttgttttacgttagccttagctactctcgaacacgcgcaaatctgcgctgtcttcgtgtattcagaactccaccctcgagtaatagattagattgctcgcatctttttcttgttcgttcttcgattgcgcacaggaaacgatctttgtgatcaggccgatctcgcatcagcaaggtcggtaaccacagggagttggttcagcgattgcattggcgcctcgggcttgctcgtcgtagtcggatcgcaagggtcatcttccgccaaatcggaattatctcaactcgccgaaagatcgggcacctcacctacatcaattggtatcagatttccaggttgatcggtgagtttatcgagcatttttttcctacagtccacaaatccacataaaaattcaggttagatcttatcccagcacccttttgagcctcgcactttctttcaataatctgcattgttgaatttgtgtgctttcgcgtcatttgttgttggttgcattgtgttcttccaccattcaaaccctagcgccgccaccatctcccgtttgatcatgccacaaaccgagtcaacattgtttccttgtttttctccttcggttacgtaaaaaaaacagaaaaaacaaatcgagtcaacggctgtttccttgattttctccttcggttacgaaaaaaaaacagaaaaaaacaaactgagtcaacgaccgcttccttgtttttctccttcggttacataaaaaaacagaaacaaaaaaaagaaaacgaaggagaaaggatacggttgtttcatcccggtcgtttttaaaacataacttgaggaaccttccgtaaaccgggcataacttttcgctcgggtgtccaaaaaaatctgaaatttttacaggagcttgttgacaccattctgaggctggccaaactcacctatggtctgtttggggttcgacaaaattgtcaaaaaaattcaggaaaataaagaaaaaaattcgtcaaagttctcgcacgcttttcagagtacttcctgattttctatagaccacatctgatatctgttttaggtgaaacttcgtgtagctcctatcttgttgcttcttgtgctgagaaaaatatcaaaaaaatcatacaaaaaagaaaaacaaaatcacctgtgatttctactagtgcctttttggcatcactagttcaatatttacggtactgccattctgttagtttcatccatcctttgcacctgtggccagcaatatagtttcgtgttttgcactataattcaactttgcattattgtttgatcgtgctaatccttgacttgagtgcagcctacccacaactccacatatttctacgacgagcaggtttctgtttctccacgcaatcgctcatccaatctttcaccggttccacctgttggttgcagttcaccactgtggcttggtaagaacggataagaacttgataacagcactagtgtgagcaccttgtgagcagtacacccatgtttttgtcgttggtttttctccttttggtgtttgcgctaactatggcaggagcacacgacatggtggatgcccagttgcaggaagtaaggggacaagttgatggacttgctgctgacattaggacgatgcatgaacggcttgattcaacgatcacttcgacgaccgagcgtttcaaccaacttgaccttgctcaaacggcgactcgcaccacacttgacaccatcctggcacgccttgatgcattgaccacaaagatggagcaggaatacggcggtgacactgagcaggacgatggagatcgccgtggtcgtgcacgtcgtgtggttcttcatccccctaatgacttattttctaagattaaatttaaaattccatcttttaatggtaaatatgatcctgctgcatatcttgattgggaattagaggtagaacagaaattttcatgccatgatattcctgctaatagcctagtgaaggctgccattagtgaatttactgattttgctttaatttggtggcgtgagtataaacaaaaacttcccattaacagtgtcattacttggacccaattaaaaactgccatgtgccacagatttgttccttcctattatgctcgtgatttgcttaacaaaatgcagcgttttcaacaagtttcacagtctattgaggaatattaccaggagttacaaaagggtatgctttgttgtggtttagttgagtcaacgctgctatggcgcgttttcgtggtggtttgaacagggaaattcaggatatacttgattataaggattattttgatataaccacattgtttgaatatgcttgcaaagctgaacgtgaagtgcagggacgacgatcaaagacatatactaactctcttgcaggccgggtccaacacacaactcaactccttccagccctgcaccttctacgcctagcactacatcgcgcacagggacgaccaagccaatggcgctccctgccaaaggcgccgcttcttccacaggacgtacacgggatattcagtgccatcgttgcagagggtttgggcatatgattggggactgcccaaacaagcgtaccttgcttatacgtgacaatggtgagtactcttcagccagtgattcagaggaaactagtcatgctatgattgccactaaccatgcagaaaatgaggaagtccacgttgatcccatcgacgccgataggtatgagagtcttgttgtgcagcgtgttctcagcacacaggttgcccaggccgaaaaaaatcagcgacacactctattccataccaagggcgtcgtgcacgaacggtcgattcgcatcatcatcgatagtggcagctgcaacaatttggcaagtatagcgttggtagagaaattatccttgcccactcacacacatccacatccgtatcacattcaatggcttaatgatggtggtaaaataaaggtaacacgttcggtacgtgtccccttttcgctgggttcttattctgattatgctgattgcgatgttattcttatggaagcatgctctttgttattgggtcgaccttggcaatatgatactgatagtttacatcatggtcgttcaaatcattattctttcatgtttaaaggccagaaaataattatacatccaatgacccctgaccaaattttgaaagatgatcttactagggctgctaaaactgcacaaccagtcaaatcgacatcagccgcacctattaaatctgaaatcaagttgcactctcctgttttacttgctacacgtgctgattttgatgatctccatgaagctcatatgccctgttatgcacttgtatgctcgcgcatgcttgttcggcttgatgatgcaccgtctttggatataccccctgctgttgttaaccttttgcaggagtatgctgatgtttatcctacggacttaccaccgggtcttcctcccctccgtggcattgagcatcagatcgatctcatccccggcgcttctcttccgaaccgctccccgtaccgtacaaatccagatgagacgaaggagatccagcgccaggtgcagacgctgcttgataagggttacattcgtgagtctcttagcccttgctcggttcctgttttactcgttccaaagaaagatgggtcatggcgtatgtgcgtagattgtcgtgctattaataacatcacagttcgttatagatatcctattccacgccttgatgatatgttagatgagcttagtggtgccgttattttctctaaggttgatttgcgtagcggttaccatcagattagaatgaaactcggtgatgaatggaaaacggtttttttaaacgaaatttggtttatatgaatggttggttatgccatttggattgactaatgctcccagcacctttatgcgtttaatgaacgaagttctacgggccttcataggtttgtttgttgttgtttatttcgatgatatccttatttacagcaagtctatagaggagcatttagaacatttgcgtgctgtttttgatgctttgcgtgctgctcgcttgtttggtaacatggaaaagtgcacattttgcacgcaacgtgtctcgtttcttggttatgtggttactccgcagggcattgaggtagatagcagcaagattgctgccattcgggagtggcctacaccgacgacggtcacacaaattcggagctttcttggacttgccggtttctaccgcagatttgttcgtgattttagctccattgcagcgcctctacatgagcttacaaagaaagatgtgccgtttgcttggagtgattcgcaggaggtagcgttcagcactttgaaagataagttaacccaagctcccctattgcaattgcctgattttaataaagtttttgagcttgaatgcgatgctagcggtattgggctaggtgctgttttgttacaagaaggaaaaccagttgcatattttagtgaaaaattaagcggtgctagtctgaaatattctacttatgataaggagctttacgctttagtgcgcactttgcatacatggcagcactatctttggcatcgtgagttcataattcattctgatcatgaggctttaaaacatattcgtacccaaacaaatctgaaccgtcgtcatgctaaatgggtcgaattcattgagttctttccttacattattaaacacaagaacgggaaggacaatgttattgctgatgctttgtctcgtcgctataccatgctgtcacaattagattttaaaatctttggtttggacactgtgaaggatcaatatgttgacgatgctgattttaaagatgctttcggccattgtattaatgggataccatggggcaaatttcacatacaggatgggttcctgtttcgcgctaacaagctgtgtgttccagctagttcggttcgtcttttgttgttacaggaggcacatggaggcggtctcatggggcattttggcgtctacaaagcgcatgaggtgttggctgcccacttcttttggcctcggatgcgcgctgatgttgagcgccttgttgcacgctgcactacttgtcagaaagctacgtcatggttgaacaaccatggtttgtatatgcctttgcctgtcccttcttctccttggcttgatatctctatggactttgttttgggcttgcctagaactaagaaggggagggatagtatttttgtggttgttgatagattctctaaaatggctcactttataccttgtcataaaactgatgatgctagcattgttgctgaattgttctttagagaaattattcgtttacatggtattccaaaaacaatagtctctgatcgcgatgctaagtttctaagccatttttggagatctctttggaataaattgggaactaaattgttatttagcactacttgtcatcctcagactgatggacaaactgaggtagtaaatagaactttatctaccatgcttagggctgttttagacaagaatttgagacgttgggaggattgcttgcctcatgttgaatttgcttacaatcatgccacacattcttctacaaagatgtgccctttccagattgtttatggttacattcctagggcacctattgatttgatttcacttaatgctgcgaacgccccacatgtagatgcttctgcacatgttgaacaaatgattaccatacatgaacaaacgaaacagaacattgctgctactaatgcaaaaaatcaggttgctggtagtaaaggaagaaaacatgttacttttgagccaggtgatatggtttggttgcacttgagaaaggatcggtttcctactttgcgccgttctaaattaatgcctcgtgctgctggtccttttaaggtgctaacaaagattaatgataatgcttatatccttgacctgcctgcggaatttggtgtttccactagttttaatgttgcagatttgaaaccatatatggccgaggatgaggagttgtcgtcgaggacgacttcacttcaagaaggggaggatgatgaggacatcactatgagtacgactacaccagcagcacctccacatcaagcgccacttccttcattagctgggccaatcactcgggcccgtgccagagatcttaacttcgtcatgctactgaagaatgagggcccagaagaatagacgaccagcccaactgcggcccatagtggacgacctagggttggccgcccctaggggctgcgccccctctatttatctaggagctgcgtctcctttattttggagttttgttttacgttaggcttagctactctcgaacacgcgcaaatctgcgctgtcttcgtgtattcagaactccaccctcgagtaatagattagattgctcgtatctttttcttgttcgttcttcgattgcgcacaggaaacgatcttcgtgatcaggccgatctcgcatcagcaaggtcggtaaccacagggagttggttcagcgattgcattggcgcctcgggcttgctcatcgtagtcggatcgcaagggtcatcttccgccaaatcggaattatctctactcgccgaaagatcgggcacctcagctacatcaagcagcacctccacatcaagcgccacttccttcattagctgggccaatcactcgggcctgtgccagagatcttaacttcgtcatgctactgaagaatgagggcccagaagaatagatgaccagcccaactgcgacccatagtggacgacctagggttggccgcccctaggggctgcgcccctctgtatttatccaggagctgcgcctcctttgttttcgagttttgttt

SEQ ID NO: 646 - DNA, 12150 bp, Zea mays
  source (0)...(0): Zea mays BAC clone full insert sequence contig bacm.pk108.h15-2.fis43
aagtcccgaatactcctgcaaaatgttagtaataacaggaggcaaagaatgctgcatatcttgaattgaaatcaaagcatccttgcataccaaggcgtaggcaacagtagtggaagcaaataattcattaacatcagtttttgttgcaagcaagcaatgtcctttcaattttatcccatctttgttattaccaacagctttaatattcttgttgttctcagttttagctttggtagctttagcaacatcatcacgcacaatagcctcaggggacatgggaagcaaaataattttcttatcatggtgtatgagagaatattgatttgatctaccatgatgcatacaatctgaatcaaattgccatggtctacctagcagaatattacaagcatccataggcacaacatcacagtcaacaacatcacgatatgaaccaatagcaaaattaattcgtaccagcttggttaccttgaccttaccactattgttgagccattgaatgtgatatggatgcgggtgcggtttggtcgtaagtgcaagcttctccaccatgtcgctgctagccaagttgttgcagctacctccatcaatgatcaaacgacatgaacgctccttaatgacacactttgtttgaaacaacgtatgtcgctgattctgctctgccttctccatttgtgcactaagcacacgctgtacaatgaggctctcataatgctctgcatcatctgcaccaatctgttcttcgggtggttccttagtgcctgcatcatcagccgcaagcaaagcaagtgtagcttcatccaaatcactagcagaggaatacccaccatcgtcttttaccaccaaaacacgctgattaggacaatcacgctgcacgtgtccatagcccttgcatcgataacacagaacatctcttgttctacctgtggaagctactgaagaggcactacctgcgggtttctgggcagatttggttgctgaatttgtggaagatgcacgtggtttgtcgctggaggaaggcgggggtgctggtcgacttggcgaaggagttggtgctggtgtacggccggtcatggacgtagtcgtgcgctggtgccatggtgtagattttcctgcagaaacattagaccttgcactagcacgtcgtccctgcacttccctttcagctttgcaagcaagatgaaacaatcgggttacattagcataatctttataagcaaggatgtcctgaatttccctatttaacccgcccaaaaatctagccatagcagattcctcaccctcctctatgttacaacgcagcatacccatttgtaattcctgataatattcttctacacttttagtaccctgtctcaattgttgcaacttgtttaacatatcacgtgcataataagaaggaacaaatctagcccgcatgacccgtttcaacgcatcccaagtttgtggcatgttattaggattcttcttaccatgttctatccaccaaacagaagcaaattcagtaaactcactagtagcagctctaacccgcgcattctcaggaaattcatggcatgcaaacttttgatcaaccgcaatctcccaagtaatgtaagcatcagggtcatatttaccatcaaaaggaggtattttaaatttaaccttactaaaagcatcatcattaccatgtacctcacgtcggtgaaaaccacccatacctctacggttagtacgtagtcgccggcgattaggtgcttcttggtcatcttgttcagtatcagcaacatagtcatcccagttaccttcggcgccctcatcacgcccaccattgatattagcatgcatctcatcaaaccgcctcaagagtgcgacaaggctcttgtcaatatgagcaactgtcatttccacatttgcaagtttggtgttcgtgtcgatctgtgtggcctccaattgccccatcttttcattcgtcacctgcatgtcattatcaagaccttccgtgtgcgtcttcactagccttacaaagtgttgtatgatacccttggtgcgaggagagtgtggcatattacgagaagcatcatcaacctccaatcctgccatggttagacgaacagaggcaacaagaaaaaaaaaacgtgaaggaataaaaactctacaactattaggatgtagctactgcaaggcgctcactctcaacctgccacacaagctcttaccaattcttaccttgcacaacaggaggggtcagcaaccaacaagtctgcaaccgtggaataagtgtatcggtgccgcagcaacacgacctgtcaaactgtagtcgaaatatgtagagttgtaggtgggctgaagcaaggaatacactagtaccacgttagttacaaaagcaagctgaataatcgttcaacggtggtactgtgctggtcctaggctaaaccaggctagagacgtgagcctaggcacaaaggtagtcactgaaaaagaacaactagcacagcacaaagagaaacaacagatttagagattcagcccccttcttcttcttttccttttttttcttttctattcttttttttcttcttcttctgtttttttttgcaggggcctaaacccttttttttcactatgacaacccaaacaataaagatattgctaacaacccctttaaatcagatttaacaaatcttgttaatataggaagtccagaaatctctacgatgattgcggagcgctcagaacgaattttgagataaggtcagatccgttggaaagaagataagataagctttccagattgtatttaaacttccaaatcggatatgatatgtatccgtggtggcaaaaacgaaccagagatgtttttggtgatggtggatttcgtggtgaccaaaacgtggtagaactcaaaactctaaaggaataaactaagaccagcaactcgacacaaccgatgcaaccaaaaactcaacaagccctaactaagtagtactagtaaatgctcaatggtttataggattgcggtaaaactaatctactattttttggctttttctggactataggagataagaaaacagcgaagaaaagtaaatctctcaccgataaaccttgctctgataccaactgatgtgcacccgttgggtgattgcccgatctttcgatgagagggtgtggaataactcgattgggggaggagacgacgttcacggcccgactacagccttccaaagacgctgcgccttagcaaccgatacaccacctcctatggctgtcacgatcttgtggagcgtgacaccctggccactagggcactcgtcctgcaagcaatcgaagaactagcaagaacaagtagaacaagtactgaattaccagatctaaatgtaggtttaaagatcaaactacaatatggtggggttccgaagacaagaagacgggcggctgaactagcacgcgcgcttgcaagcaagtagcgagagctaaacttgatctaaacaaaacccgctgttcttggtggcggctagggggtttataaacatgggaggacgaccacaagggtattggggtcgtgctgcaaccctaggatgcgtccctaatggacctaacttgatacacgacccattgggccaaaatagggtgacgcagcaccatgggcagaaaaggcaggaaatgtctcggtaagaaaacaatgattacggcggcctcagaacagatatgactataattccggatccatatgaaagtagacttgataagctttccatgttgtgcttgaacattccaatccgagcccgcatctgaccgtggtgaccgtcacaagttggtgttcttctgcagtccgaatccagcatgttcaaatccttttccctttcggtcttctccctgattcctaagcaaaacaagagtgcatgggtctccatggtctaaatatgatggacatgaactcaagagtgtaatcacctgatggttgagttgacgagcacgagcgcgagtaatgggaccagaaattggtacttgtattggtatagatgcatcagtagtgtggatgtcttcatcacctgatgggtacgattaagtcagggatcagtccacacgagtgacttgatcacgcttcgctcgtgcctagcctcggccaagggcagccgacctcgagagacttccgtctcgcccgaggcccccctttttaacggcggacgcacctccggctcgcccgaggccttggcttcgtctagaagcaaccctgactaaatcgccgcgccgactgaccaggttgcaggagcatttaacgcaaaggtggcctgacacctttatcctgacacgcgccccccggcagagccgaagtgaccgccgtcactccaccgctccactgaccagtctgacagaagaacagcgccgcctgcgccacaccaattacagtgccactcgacagagtgagtctgacaggcagtcaggccctgccgaaggcgccatgggaaactccgctccgcccgaccccagggctcggactcgggctaagacccggaagacggcgaactccgctccgcccgaccccagggctcggactcgggctaagacccggaagacgacgaactccgctccgcccgaccccagggctcggactcgggctaagacccggaagatggcgaactccgctccgcccgaccccagggctcggactcgggctaagacccggaagacggcgaaatccgctccgcccgaccccagggctcggactcgggctaagacccggaagacgacgaaactccgcctcgcccgaccccagggctcggactccgccctggcctcggccaaacgatctccgcctcgcccgaccccagggctcgggctcggcctcggcaacggaagacagactcgacctcggcttcggaggagcccccacgtcgccctgcctagggcacaggcccgccacgtcaacaggaagcgccatcatcgtcctaccccgaatcgactcgggtcacggagaacaagaccggcgtcccatccggccagctccgccggatgggcaatgatggcgctccacgagctctgtgacgacggcggccctcagctctcttacggaagcagggcgacgtcagcaaggacccgaccgctccaacagctgtccctccgccaggctccgtcgctcctccgacagccacgacatcacgccagcaaggtgccaagacctctccggctgccacattggcatgtacctagggcgctagctctctctccgctagacacgtagcactctgctacaccccccattgtacacctggatcctctccttacgactataaaagggaggaccagggccttcttagaggaggttggccgcgcgggaccgaggacgagacaggcgctctcttggggccgctcgcttccctcacccgcgtggacgcttgtaacccccctactgcaagcgcacccgacctgggcgcgggacgaacacgaaggccgcgggacctccacctctctcacgcccgtctccagccacctcgcctctccccccttcgcgctcgcccacgcgctcgacccatctgggctggggcacgcaacacactcactcgtcggcttagggaccccctgtctcgaaacgccgacaaaatctgataccaattgatgtagctgaggtgcccgatctttcggcgagtagagatatttccgatttggcggaagatgacccttgcgatccgactacgatgagcaagcccgaggcgccaatgcaatcgctgaaccaactccctgtggttaccgaccttgctgatgcgagatcggcctgatcacgaagatcgtttcctgtgcgcaatcgaagaacgaacaagaaaaagatgcgagcaatctaatctattactcgagggtggagttctgaatacacgaagacagcgcagatttgcgcgtgttcgagagtagctaaggctaacgtaaaacaaaactcaaggaataaaggaggcgcagctcctggataaatagagagggggcgcagcccctaggggcggccaaccctaggtcgtccattatgggccgcagttgggctggtcgtctattcttccgggccttcgttctttaacagcataatgtagttcaattctcttgcacgggcccgagtcactggcccaggtggaaggggtggcgcctggactggggaagatggtgcctgggctggagaaggtgctgctggtgtagatgtgctcgtgttggtgttgatgtcctcatcaaacatgcccaatccactacttcaggtccaaaagacatgtttggagtggtttcgcgcaatttcattgccgcacgtcacccattccgaaaacgggtgtcggggtgcatacaaagcacgagtttttgccaccggaaccatttcttcgttttttgcaacggacatgcccaatccactactttaggtccaaaacacatgttaagagtggtttcgcgcaatttcgttgccacacgtcacccattccaaaaacgggtgtcgggggtgcatacaagcacaagtttttgccaccggaaccatttctttgtttttcgcaacgaacatgcccaatccactactttaggtccaaaacacatgttaagagtagtttcgcgcaatttcgttgccgcacgtcacccattccgaaaacgggtgtcggggtgcatacaaagcacgagtttttaccaccggaaccatttcttcctttttcacaacgaacatgcccaatccactactttaggtccaaaacacatgtttggggtggtttcgcgcaattttgttgccgcacgtcacccattccgaagacgggtgtcggggtgcatacaagcacgagtttttgccaccggaaccatttcttcgtttttcgcaacgaacatgcccaatccactgttttaggtccaaaactcattttggggtggtttcgcgcaatttcgttgccgcacatcactcattccgaaaacgggtgtcggggtgcatacaaagcacgagtttttgccaccggaaccatattttcgtttttcccaacgaacatgcccaatccactactttaggtccaaaacgcatgtttggggtttcgcacaatttcgttgcagcacgtcactcattccgaaaacgggtgtcggggtgcatacaagcacgagtttttgccaccagaaccatttcttcatttttcgcaacaaacatgcccaatccactattttaggtccaaaacacatgtttggggtggtttcccgcaattttattgccgcacgtcaccaattccgaaaacgggtgtcggggtgcatacaagcacgagtttttgccaccggaaccatttcttcgtttttcgcaacgaacatgcccaatccactactttaggtccaaaacatatatgtttggggtggtttcgcgtgatttcattgctgcacgtggtgcattccgaatacgggtgtcggggtgcatacaagcacgagtttttgccaccggaaccatttcttcgtttttcgcaacaaacatgcccaatccactactttaggtccaaaactcatgtttggggtggtttcgcgcaatttcattgccgcacgtcacccattccgaaaacgggtgtcggggtgctgatgaacccaacgggtagaagggtgcccgatctttcgatgagagatgatggaggtggaaaaacttgctggagaacgacgttggctgcccgacacacgcgtttacaaggaagtagcaaaggctaaacttacatcaaacaaaacccaagttctttggtggctgctagttgcttaaatagagaaataggaagaaggaattctggtggagtcatgaagttccctcggcagttcctggacgcctcgggtgtagtctcccattaattcttgatccaccagcaagtagacgaagggagctttccacaaagtatttatttgcattaaacgactttggaagttggaagatatgccccatttaaacttgtacttgatgctgttacgaaatcctctcgggtgcagcaacctttattgccttgttgccttctccagtccaagatggttcacctcccaaacacctgagcataataaagtcatcacaaggctttagtacctcatttaaagaagaattagcttcaatagcaaggaacgagttcacctgataattaagtttacgtgcacgggctcgtgtcattggtccttgattagctacgaatggtgaagtggtcactggtatggttgtatcaatgatagtgatgtcctcatcatcctccccttcttgcaacaaagtcgtcctcgactcaaacgtgtcattctctctcaagtatggtgttaaatctgcaatgttaaaagaggaactgaccccaaaatctgcatgcaactgaactttatatgcattatcattaattttgtgaagcactttgaagggtccagcagctcttggttgtaatttagatttgcgtatatcagggaatctatctttccttaaatgcacccatactaaatcaccaggttcaaaggtaatatgctttctacccttgctacctgcttcttcatacttagcattcatggctttaatatttgctttagtttgttcatgcagctttataatcagctcagcacgacgagaagcatcaaaattcattatttcagaatgtgggatggcgataagatcaataggaggcaaattcaatgtgaggcaaacattcttcccacaattttaaaagggcatagtttagttgtagaatgctgagaacgattataagcaaattcaatgtgaggcaaacattcttcccacaatttgatgttatgtttcagaacagccctaagcatggtagataaactatggtttacgacttcggtttgtccatcggtttgagggtgacaagtagtagaaaagagcaatttagttcctaacttagcccataccgttttccaaaaatgactaagaaatttggtatcccgatcggacataatagtgtttggaaccccatgcaaacgaacaacttcacgaaagaacaaatcagcaacatgggtagcgtcatcagttttgtgacatggtataaagtgtgccatttttgaaaatctgtccacaacaacaaaaatactatccctccctttctttgttctaggtagccctaaaagaaagtccatagaaatatcctcccatggtgcactaggaactgggagaggcatgtataaaccatgtgaattaaggcgagacttagctttttgacatgtagtgcagcgagcaacaattcgctccacgtctcttctcatcttcggccaaaagaaatggctggccaggatgtcttctgtcttcttcacaccaaagtgtcccatcaacccaccgccatgtgcttcctgtaataataatatatgcacggaaccagctggaatccataatttgttagcccgaaacacaaagccatctgtgagaacaaatttgttccatgtccttccttctttacaatgtaatagcacatcattgaaatcagcatcgaaaacatattgttgtttaattgtttccaagccaaaaatcttaaaatcaagttgagacaacatggtataacggcgagacaaggcatctgcaatgacattatcttttcctttcttatgtttgatgacatagggaaaagattcaataaattcgacccacttggcatgcctacggttcagatttgtttggctccttagatgctttaaagattcatgatcagaatgtataacaaattctttaggccataagtagtgttgccatgtttccaaagttcgaactaaggcatataattctttatcataagtggaatatttcagacagggtccattcagtttctcactaaaataagcaacaggctttccttcttgcaacaagacaccacccaaaccaataccactagcatcacattccaattcaaaagtcttactgaaatcaggtaattggagaaggggtgtatgagttaacctatccttcaatgtttcaaatgcaacctcttgcgccttgccccacgaaaatggagcacccttcttagtaagctcgtgcaatggccctgcgatggtgctgaaatctttcacaaatcatgatagaaccccgcaagcccgagaaagcttcggacttgcatgaccgtggtagggactggccagctatgtatggcctccacgttagcctgatcaacttcaattccctgcggtgtcacaacatagccaagaaaagagacccggtctgtgcaaaatgtgcacttgtcaaggttaccaaataagcgcgcttcatgtaaagcattgaaaacaacacgtagatgatcaagatgatctactagacatttgctatagatcaagatgtcgtcgaagtagacgaccacaaatcttccaatgaaagcacgtaaaacctcattcattaatctcatgaaagtactaggtgcattagtgagaccaaaaggcatgactaaccactcatacaaaccaaacttggttttaaatgccgttttccattcatcccctagcttcatgcaaatttggtgatatccactacgtaagtcaattttagagaaaatcatcgagccactaagttcatccagcatatcatctaacctagggataggatgacgatatctgatggtaatgttattaattgctcgacaatctacacacatgcgccatgagccatctttctttgggactaataaaacagggacagagcaaggactaagggactcacgcacataacctttatcgagtaattcttgtacttgtcgctgaatctccttggtttcttccgggttcatcctgtatggcgctcagtttggcaaggaagcccctgggatgaggtcaatctgatgctcaattcctcttatcggtggcaggccaggtggcacatcgtttggaaatacatcagcatattcctgcaaaagattagtgacagtagaaggcaaagtagatggtatgttgtgaagtgagaacaaagcatccttgcaaataaatacatagcagattgaagcaacatcatttaattcaagcaaatcagatttggaagcaagaaaacaagcacttttcagttgtatttctgtcttcctcacttgagcagatttagaattgtcactcttatgttgtaccaactcctttgcagcacctagatttttattatgaacagatttatttttctctttgcaagctctagcaacttcatccttcaaaatagcatcgggggacatggggtgcaatacaagcttcttctcattatgcataaaagagtagtgattggttttaccatgatgcacggtgtccttatcaaattgccatggtctaccaaataacatagagcaagcttgcataggtaccacatcacaatcaatataatcatggtatgaaccaattgtaaattccacacggaccatacgtgttaccttaagcttaccactgtcgttgaaccattggatgtagtaggggtgtggatgtggaagctgatgaggacatcaacaccaacacgagcacatctacaccagcagcaccttctccagcccaggcaccatcttccccagtccaggcgccaccccttccacctgggccagtgactcgggcccgtgcaagagaattgaactacatcatgttgttaaagaacgaaggcccggaagaatagacgaccagcccaattgcggcccataatggacgacctagggttggccgcccctaggggctgcgccccctctctatttatacaggagctgcgcctcctttattttccgagttttgttttacgttagctttagctactctcgaacacgcgcaaatctgcgttgtcttcgtgtattcagaactccaccctcgagtaatagattagatttctcgcatctttttcttgttcgttcttcgattgcgcacaggaaacgatcttcgtgatcaggccgatctcgcatcagcaaggtcggtaaccacagggagttggttcagcgattgcattggcgcctcgggcttgctcgtcgtagtcggatcgcaagggtcaacttccgccaaatcggaattatctctactcgctgaaagatcgggcacctcagctacatcaattggtatcaacaaaactcggaaaataaaggaggcgcagctcctgtataaatagagagggggcgcagcccctaggggcggccaaccctaggtcgtccattatgggccgcaattgggctggtcgtctattcttccgggccttcgttctttaacaacatgatgtagttcaattctcttgcacgg

SEQ ID NO: 647 - DNA, 10432 bp, Zea mays
  source (0)...(0): Zea mays BAC clone full insert sequence contig bacm.pk108.h15-2.fis44
tccgcgggaggtatccgatagggtctcttggagatcggagcagtcccgggttgcaactcaattgcgaactcaatgtctcggtcaggtggcattcctggcaattcatccggaaaaacatctggatagtcacagaccactgggatcttttccactggggattctatcataacaaaggcacaagaacgggtgtatccctggtcaggcaaatacagtgtggtctcaccacaagttggtgagtgcacctcaatggctctagccgcaatatccatcacagcctgattccttgtcaaccagtcagttcccaatataatatccacactctccaaacccagaatgagaaggttggctttaattatcagactaccaaactttataggcacattcttgttaatttggtaggtggcaaccctgcctcctggggtcgaaattgtaatgcccccattggtgtggtgaaagggcaactggcacttggcactaaaccttgcactgataaaactatgcgaagcaccggaatcaaaaagaacaatagcaggaaaatttaatactgtaaagataccagtcatgacgggtgctccctctggaatgtcagccatggtggtgaagttcagcctgccctgcctcacttgcaccttctgcctcttgccttggttctgatttgcattctgcccctgcctctgctggttcctggggcaattcttggcataatgcccagtgttgccacaagtgaagcacctgttgtcattggcttggcggtactgctgctgctgactattccgctgtgctggaaattgattgcggttgggtgcctgctgctgctgctgctgaggtcgaattacccatcgcccttgctgctgctggggtccccttccctgggggtcggacacaatccggaaacgctgtggctgagctgagggtcctgccacaggggtcttccttttcttctctgcctgcctagcggtaatgcagtcctcttgggagatggccatgttgactaactcattgtagctgttggccctgacggcgttgagacgatcccggagcttagtgctgagcccccttctgaatctgtccctcttcttctcatctgtatccgcatgatatcccgcatactggcacaagtcattaaaggcctgggcatactgcaacactgtcctgttgccctgagtgagtgccaagaactcattgagtttcctgtccatgatcccggctggtatatggtgtcctctaaaagctgccttaaactccctccactccacctctcggtcctctggctgcatagcaagaaaatgatcccaccaagtccttgcaggtccgcgaagctgctgggtggcgaacctgactttggtgacctctgagcaaactccatggagcagtgggaatttggattccaccactcgcagccatacatctgcgtcaagtgggtcttccgcccttgtgaacagtggaggctgggtgctgaggaattcctgataggtggccaccgcggggtgacgctggtggtctccaccaccataatgctggggtggtggctgacgttgagccagctgcctcaggatctcattctgctgagccatgagctcctgcagagtgggaggtgggggtggtggtggaacgcgctcgttctggccacgacgctgcctcccagccatctgaaaaaccacatgcttacttaacaccacagttccaatttcaagatttcaacacggggaaaagttaaaaacagcatgaaagatctaacttcaacaaaagggattctttaagaggcataaattcttccttccaaattaaactgataatagcattcctcaaacaagcccccaagagagtttaacatgattacatcaatttgttctaaaatgactcaaccctacctagcctagtaccccaagggtgcaaaagctaagctagctgcgaggagtccgactgtccgacttctaagcctaccttggacacctagcgagcgaacgaagcaacactggactcgggggaaggtggtcttcccgagccagcagtgtccacactggaggcaggctcatctcctccctcaatgtcgacgtcctcgtcgtcctcctggtcctggatctcttggtgatgcatgtccaggtgctcgttagcctcagcaagctgttgctgagtgttaaggagctgatcctctaggacctcaatggtgttctcccgggtgcccactagctcctccaactcatgaatctcaccagacagctgctccacttgcaaatctttctgtaccatttcctgagataggtcaaccacaagctcctctcggttatccagcgtgatctttgttgcctccagcagtgccatcaaatgggacattgcctcaccgcgcatcacttgcagatggtacagagcattcatgcaccgtactgttaagtgcgcagtctgtcctgggtagatggcccagatgtccttggcatgttccacccgatccttccacattgggtcgtcctccttttcagcggggaacaagccaatgggatgggtagccagctccaagggatggaacccgcagaaggtagtcaatccatgcagagcgatcgcctcgatcgtgtcctctgcccggtacccgaaagactctgagtccaaggagcgccagcctggctgcaggggatgaggctccagagtcatcctcaccctacagcggggcactcggtgcttctcgaactgctgcaccgcgtactgagggggtgtcatgtatccggctccctgaagcacttcccataaaatgcggggaaaaccctctcgtgcaagtccgtcagtgtgggtcagtgcatttccttcatcggaggatccgtgggaagtcatctgtgtacggtcaagcgtaagtaaaagaaaaagaatgtaaaaagaacaaggaaaataaaactcagccctcctctagttaagtaaaaaggcactagggacctagttggttgttatcttgtttttaagtcttttactcagttatccaattgcttaattttgaatgcatgcatgctcgtcctgaacgacctcacaacaagatagaaggaatagggaggaactcccatcctgtaaaagtggtctgtagggcctagttacttagccacctagctacccttctattaacctaaggcttcacgtcctaggtctatcctgctcgtcctactatctatccaacttgtttctatcaagttttatttagaaaattgatggtatttacattttattgattcctctgtggtggtacaagctccgataccagctgtggcggaactgcccgaattattccaacttaagtgtccaagtcccgccttagaggctagaccacacttaaatgggaataacccatcaatccctcggatctagtccgacacggccactgacaggatcaagtaccacaatctcactcgaaggtgagtcacagagcaaatacaataaagcataaaaccatacatgccataatgttaaattattacatcaccattatcatcatcggagtttttgcaaaagtatccatcattgttcgaagtgcagcggaataaaactaacggtaaataaaacagagagatggggaagcctgtcccatcactcctcatgctcctcctcagccgaggcagggtcccactcgacagtccaacccggtggcagggtggtcggccaagttatcccagcaaccatctcctccagggaacctgtaaaaattatgccacaagcaaggctgagtatactaatactcagctagacttacccggtgtgaggagtctactcctctacctctagacatgcagctgtttggctgtggggtttggttgccaaaagcactagctgagtttctaaatcaagattttaacttaatcaaagttaagtgtgactctcttaaggctaaaagtggactatctactcatacatggtagcaagcatcattaacagtcaacatcttatctcaactcatcatacttccacttattactcaatgcagtacaatggatcaagcagtctcattagctgcgagaagcagacgattcgaatcgagtttttatccttgcaaggtaaacctaaacacacgacatgtaggggcactccgtccccacacacatcaaccgtccccatcgattccctggcaacagatcaaggctcaccgccttggcgtacaatgccccactgaccccgactggccgacgtgcagtgaccgcacttgtacccaccataaccggaatgggagacctcgtctcaggtcgcgtgaggggatatgtctgcgggcaggttcactcaggtactaggcttaccgatttaccatatttctcggtatgtgtttagtacattcaaacgcttgacgcaggtatccgcacgttaatccttattccattttccatctcgtaaacaaccaatccccatggattgttgtccaccaactagtatcatgatagtgtgaaagtgggtacaatcaatttcctgatctcgcgcgagtgctagaaaaatcactcgtcttctaccaagatcctatttaattaaagcaactactcgacctgtcatactagtattcatttcaaaaggattcctgagatcatgcaactagggtttcaaacaattcctacacctaagtgcacaatcaatcctacaatcattaagtgaagtaaaatagcataaataacaggttatgcataaaaccggggcttgccttccaaagcagtggcaggcaggtcctctggtgctggctctggtgctggatctggggcaacctcctgggcagctccttgctccggcacgaggatgtactctccgtccgcaagattacagtctatcaaaatgcaatgaacatgtatgtcatgattatgcaagatttaagaacattaagttaaagaaactaagttaagaattaacttagggtttcctggttctgtggggcttctagtggtatacatagactttgacttattaccctttaagcttaggtttggctttaggataacatagtagaatttgtattgtcttgatacactctagtggacagagtacaaggttttggaaatcattatttcacatttttcattttcctttatttaattttccatttagggtttctaaggtaggtttgaactacatcatggttttaataatttctaaaaattctgtaaaaattatagtgggttgtcactggctattttagcttgttttaagaatttgaggcttaaggtataaaagttaggccttaaacaaaaataacaaaagttaggcaaaaaggggcactttacactacacctcctagttaggggtaggctctgtcctaaaggttatttttgttgacatcctctggtaataataggtctttgtgctaaaaaccacaggaaactaaggggtggttaattagctatgattttcccaagtttaatgtcaaaaaggcactttctacttccttattatttgaaaaatgtcaaacagcagatttcatatttttcttaggttctttctaataaaacaatagtgatcccaagggtgggggtgttttcaccttggggttatttttgtggagtttttctaatttatccttgttttattaatttaaaagagatcttaattattttacactaaaacagggtatgatatatttttctagtgaactacattaactaagtatcttaacaaaaataggggtgccctctggttcaatatttgtgtcacttttcctatttttcttaaacttaagcatatttggaataaggggttaaaactaacttaatgtaatggacagaggggtttaacatttttaaacaggttagtaggtgaatataaacttctccaaattttcctaaccttagtcaaatagcctaactatttttcttactattatttagcttttggccaaagttaacattaaatcagaacttttaagttttccaccgtaccaaggggttttatatttttcctaaataggttacatgatttagagtctggcaaaattggtttgaccaaaattggataaaccaaacagaagttatgggtttttaaagtttctgtttgaatttaaattaggttttaattaagttttcctggaaaaacagtttgcgccgaggtccctgggtttaaaacaattcaaacctcgcagatctacccttaaggcactattcacttgagtctctgacctttcacttaaccccctgggtttctctccctctcacccgcagtccctccctcaactgaaacagtagccgcgggaaagaaaagggtggcgcggcttaccggcggcgagggaggtccggcgaagggtagggttggctcggggagggtctggcgatcacgtcgaggtacggctcgtcgtcggggatggccggaatcgcccggtccacatgagcagtcgggcgagctcgtcggcggcgcgtgctccggcctatccacggcggcatagttcaatccaagggcatagggagcttcgtggaggtctaaggagtctaaccgtgcaaggaatcgaagagaggcgcacggtgtacctcggtccacagttgccggcggtcggttgaagtccggtgaccttgggccggcctctccggtgaagcagagcccgattcctcgctcggggagcttcacggagacgtgcacagtcttctccgggggctggacggggttgggaatggctgggctggccggtctacggtggcaggggctcgggtggccgcgggcacgtcgcgtatgggcaaacggcggcgaactgagctccggtgaggcttgagcgcgtgcggaggggtacggccaaggctcctgggcgttttatagtcgcggacgtggaccagggcactggcttggcttgggcgcggcgcgggcgcgcgcgcgggcgtgctctggcgcggcagacggcgtcgaacacgtggcggtttgtttcttccagtgttcaaatgtcgccagaggtcgcaaacgtgcgaatctttgcaaaagtccggcgcagacctcttcctggcacctagggctgtcactcaactgtgagacgccggggcagatacggcctagggagggagatcttcgggtgccaaaacaggtgtgtcatactgagcatatcacgacaaaagccatgccatggcatgtcaaacgtccgagtctcgagctcaactttttccagtgggtgccctaagtggtattgcacatttttggtatagaacccaagtggttttggcgccatttttaaagtgaacacggttgatctttgatttagggctaaaatgggacttagagggaattagagagctctagctctctctccacttggagatttgaaatggggtttccctaggggcctttttgtaatatttccctcccctaattgatggttataatgttgcttagggtttgggtaaaaattacccatgttttgcacatttgctcactctctttcccctcttatccatggttttgggagatagggtttaagagaggcctagggttctttccccctctcccaaggtgatagttgcacacaattagggtaatgcctttggtcattcccaactcttggtaaaaacttagtttccaaagccccttatacttttgctccttaagttctttcacatgtgatcatagtcttgagtgccaaggtgtgctccagccatggcaacacctggggtgttacagccctccccccttaaaggaatctcgtcccgagatttgaggtagagtcccttggagggtgctggaaggtgtgttggtgctactctttctttatactcaagtttctcttgttaactgctcttcgaatgtcattctctttgcaacttcagaaggaagcccttcttaagttgaattcccaacttagactattcttgctatcttagtttcccttataattgatttcaaagggcaggtgggggggttctgtggttacataccgactcttttgggtagaaagtcggggaagcgagagcgtagaaaatcctcagtctcccatgtagcttcttctgttgaatggtgactccactgaaccttatacattcttactgtccttgcccgagttgatctatccttttgatctaataccttgacggggtactcttggtaggataaatctggttctatctcaatgtctggttccgggagtacttcagtgggtagacgaacacatttccgtagctgagatacatggaacacattatgcactgctgacatgtgaggtggcaattccaattggtaagctacgggtccacaacttgccttgatctcatagggtccaatgtagcgaggggctaacttgcccttgatcccgaatctctgaacacccttggtgggggataccttaagatagacatgatctcccacctcaaactgtagaggtttccgcctcttatcatgatagctcctttgcctagcctgagcagcttccaagttcttggtaatgaccctgacctttgcctctgcctcgagtactaagtctggcccaaaaatttccctttctcctgcttgagaccaattcaatggggtcctacaccttctcccatacaatgcctcaaaaggtgccatcttcagactggactgatagctattgttgtaagagaactctgccaaagacagacacttgtcccattcctttccataatgtagtgcacaggctcgcaacatatcttccaaaatttgattcaccctttctgtctggccatctgtttgtgggtggtatgctgagcttcggatgacatgggtcccaagtgattcttgcagtttctcccaaaagcgtgccacaaacagtgctcctctgtcagatataatggtcttgggaataccatgcaatctcactatctgatcaacataaatctcagcatacttctcggtcttgtgggtggtgtgcacgggcaagaaatgagcagtcttggtcaatctgtccacgataacccaaatagaatcatggtgcctggaggtattgggtaatcccactatgaagtccatgcaaatgtcctcccatttccaagatggtatgggaaggggttgcaaatggcctgctgccttcaagtgactagccttaattctctggcaggtgtcacattcggatatgtatttggcaatttcccttttcattctagtccaccaatatagagatctgagatcatgatacatcttgttgctaccagggtgcatggagaatttggaaaggtgagcttcgtccagtatcttctttctaagctcagggtccttgggaacaaccaatcgatctccaaaccatagaattcccttactgtcctgtcggaaacacttgtatttctctgccttttgtttgatcatatccttgataacctgaactcccttatccccaagctgtgcctgaactatttgctcttgcaatgtgggttccaccgagatatagcttaggttacccgaagaaacaacttccaggttcagtttgcacaattcatcacacagggtggtaactcccacatccatgctcatacaattacactgggcttttctgcttaaggcatctgccacaacattggccttaccagggtggtaatgcacctctagatcatagtccttgatcaactctaaccatctcctttgcctcatgttcagatctgcctgggtgaagatgtatttgagactcttgtgatcagtgtagatgttacagtgagctcccatcaggtagtgtctccaaatcttaagagcatgaactacagctgccaactctagatcatgtgtagggtagttctgctcatggggcctgagtgcccgggaagcataagcaatcactctgctcttttgcatcaagacacatcccaaaccagtaccagaagcatcacaataaacttcaaatggcttggtattgtcaggttgagccagcactggggctgttgtcaaatgctgcctcaaggtatggaatgcaccttcacacttttggctccactcaaatttgactcccttctttaacagttcagtcattggtttggcaattctggagaaatccggaataaatcgtcgatagtaccctgccaatcccagaaaactccgaatttgctttactgtggtcgggggtttccaatccatcacttcttgcaccttctcaggatcaactgataccccatcctgagaaatggtatgacccaagaatttgatctccttcagccaaaactcacacttactcagcttagcatacagctgatgatcacgcagtctctgaagtacagtatgcaagtgtttagtgtgctcggcttcgttcttggaataaaccagtatatcatcaatgaaaacgaccacgaacttgtctaactctggcatgaatactgagttcatcaaatacataaaataagccggggcattggtcagcccaaaagacatcaccagaaactcatacagtccatatctggtagagaaagccgtcttgggaatatcactagcgcggatcttgatctgatggtatcttgagcgaaggtctatcttggagaataccttggctccaaccaactgatcaaacagaacatcaatgcga

SEQ ID NO: 648 - DNA, 12957 bp, Zea mays
  source (0)...(0): Zea mays BAC clone full insert sequence contig bacm.pk108.h15-2.fis45
ttctccttcggttacgtcaaaaaaaaacagaaaaaaaacaaaccgagtcaacggtcgtttccttgtttttctccttcggatacgaaaaaaaaacaaaccgagtcaacggccgcttccttgtttttctccttcggttacgtaaaaaaaacagaaataaaaaaaagaaaacgaaggagaaaggatacggttgtttcatcccggtcgttttaaagcataaattgaggtacctgccgtaaaacgggcataacttttcgctcgggtgtccaaaaaatctgaaatttttacaggagcttgttgacaccattctgaggccggccaaactcaccttcagtctatttggtttcgacaaaattgtcaaaacaattcaggaaaataaagaaaaaatccatcaaagttctcgcacgcttttcagagaacttcctgattttctgtagaccacatctgaactctgttttaggtgaaactttgtatagctcctattttgttgcttcttgtgctgagaaaaatatcaaaaaaatcatacaaaaaagaaaaacaaaatcacttgtgattcctactagtggcctcactagtataatatttacggtactgccattctgctagttccattcgtcctttgcacttgtggccagcaatatagtttcgtgttctgcactataattcaactttgcattattgtttgattgtgctaatcattgacttgagtgcagcctacccaaaactccacatatttctacgacgagaaggtttctgtttctccaggcaatcgctcatccaatctttcaccggttccacctgttggttgcagttcaccactgtggcttggtaagaacggataagaacttgataacagcactagtgtgagcgccttgtgagcagtacacccctgtttttgtcgctggtttttttttctccttttggtgttttggtgtttgcgctaactatggcaagagcacacgacatggtggatgcccagttgcaggaagtaagggagcaagttgatggacttgctgctgacattaggacgatgcatgaacggcttgattcaacgatcacttcgacgaccgagcgtttcaaccaacttgaccttgctcaaacggcgactcgcaccacactcgacaccatcctggcacgccttgatgcattggccataaagatggagcaggaatacgacggtgacactgagcaggatgatggagatcgccgtggtcgtgcacgtcgtgtggttcgtcatccccctaatgacttattttctaagattaaatttaaaattccatcttttaatggtaaatatgatcccgctgcatatcttgattgggaattagaggtagaacaaaaattttcatgccatgatattcctgctaatagccaagtgaaggctgccattagtgaatttactgattttgctttaatttggtggcgtgagtataaacaaaaacttcccattaacagtgtcattacttggacccaattaaaaactgccatgcgccacagatttgttccttcctattatgctcgtgatttgcttaacaaaatgcagtattttcaacaaggttcacagtctgttgaggaatattaccaggagttacaaaagggtatgcttcggtgtggtttggttgagtcggatgacgctgctatggcgtgttttcgtggtggtttgaacagggaaattcaggatatacttgattataaggattattttgatataaccacattgtttgaatatgcttgcaaagctgaacgtgaagtgcagggacgacgatcaaagacatatactaactctattgcaggccggggtccaacacacagctcaactccttccagccctgcaccttctacgcctagcactacatcgcgcacagggacgaccaagccagtggcgccccctgccaaaggcgtcgcttcttccacaggacgtacacgggatatttagtgccatcgttgcagagggtttgggcatatgattcgggactgcccaaacaagcgtaccttgcttatacgtgacaatggtgagtactcttcagccagtgattctgaggaaactagtcatgctatgattgccactaaccatgcagaaaatgaggaagtccacgttgatcccatcaacgccaataggtatgagagtcttgttgtgcagcgtgttctcagcacacaggttgcccaggccgaacaaaatcagcgacacactctattccataccaagggcgtcgtgcacgaacggtcgattcgcatcatcatcaatagtggcagctgcaacaatatggcaagtacagcgttggtagagaaattatccttgcccactcgcacacatccacatccgtatcacattcaatggcttaatgatggtggtaaaataaaggtaacacgttcggtacgtgtcccctttttgctgggttcttattctgattatgctgattgcgatgttattcctatggaagcatgctctttgttattgggtcgaccttggcaatatgatactgatagtttacatcatggttgttcaaatcattattctttcatgtttaaaggccagaaaataattatacatccaatgacccctgaccaaattttgaaagatgatcttactagggctgctaaaactgcacaacaagtcaaatcgacatcagccgcacctattaaatctgaaatcaagttgcactctcctgttttacttgctacacgtgctgattttgatgatctccatgaagctcatatgccctgttatgcacttgtatgctcgcgcatgcttgttccgcttgatgatgcaccgtctttggatataccccctgttgttgttaaccttttgcaggagtatgctgatgtttatcctacggacttaccaccgggtctccctcccctctgtggcgttgagcatcagatcgatctcatccccggcgcttctcttccgaaccgcgccccgtaccgtacaaatccagaggagacgaaggagatccagcgccaggtgcagacgctgcttgataagggttacattcgtgagtctcttagcccttgctcggttcctgttttactcgttccaaagaaagatgggtcatggcgtatgtgcgtagattgtcgtgctattaataacatcacagttcgttatcgatatcctattccacgccttgatgatatgttagatgagcttagtggtgccgttattttctctaaggttgatttacgtagcggttaccatcagattagaatgaaactcggtgatgaaaggaaaacgacttttaaaacgaaatttggtttatatgaatggttggttatgccatttggattgactaatgctcccagcacctttatgcgtttaatgaacgaagttctacgggccttcataggtttgtttgttgttgtttatttcgatgatatccttatttacagtaagtctatagaggagcatttagaacatttgcgtgctgtttttgatgctttgcgtgctgctcgcttgtttggtaacatggaaaagtgcacattttgcacgcaacgtgtctcgtttcttggttatgtggttactccgcagggcattgaggtggatagcagcaagattgctgccattcgggagtggcctacaccaacgacggtcacacaaatttggagctttcttggacttgccggtttctaccacagatttgttcgtgattttagctccattgcagcgcctctacatgagcttacaaataaagatgtgccgtttgctttgagtgattcgcaggaggtagcgttcagcactttgaaagataagttaacccaagctcccctcttgcaattgcctgattttaataaagtttttgagcttgaatgcgatgctagcggtattgggctaggtgctgttttgttacaagaaggaaaaccagttgcttattttagtgaaaaattaagcggtgctagtctgaaatattctacttttatgataaggagctttatgctttagtgcgcactttgcatacatggcagcactatctttggcatcgtgagttcataattcattctgatcatgaggctttaaaacatattcgtacccaaacaaatctgaatcgtcgtcatgctaaatgggtcgaattcattgagtcctttccttacattattaaacacaagaacgggaaggacaatgttattgctgatgctttgtctcgtcgctataccatgctgtcacaattagattttaaaatctttggtttggacactgtgaaggatcaatatgttgacgatgctgattttaaagatgctttcggccattgtattaatgggataccatgggacaaatttcacatacaggatgggttcctgtttcgcgctaacaagttgtgtgttccagctagttcggttcgtcttttgttgttacaggaggcgcatggaggcggtctcatggggcattttggcgtctacaaaacgcatgaggtgttggctgcccacttcttttggcctcggatgcgcgctgatgttgagcgccttgttgcacgctgcactacttgtcagaaagctaagtcacggttgaacaaccatggtttgtatatgcctttgcctgtcccttcttctccttggcttgatatctctatggactttgtgttgggcttgcctagaactaagaaggggagggatagtatttttgtggttgttgatagattctctaaaatggctcactttataccttgtcataaaactgatgatgctagcattgttgctgaattgttctttagagaaattattcgtttacatggtattccaaaaacaatagtctctgatcgcgatgctaagtttctaagccatttttggagatctctttggaataaattgggaactaaattgttgtttagcactacttgtcatcctcagactgatggacaaactgaggtagtaaatagaactttatctaccatgcttagggctgttttagacaagaatttgagacgttgggaggattgcttgcctcatgttgaatttgcttacaatcatgccacgcattcttctacaaagatgtgccctttccagattgtttatggttacatccctagggcacctattgatttgatttcacataatgctgcgaacgccccacatgtagatgctgctgcacatgttgaacaaatgattaccatacatgaacaaacgaaacagaacattgctgctactaatgcaaaaaatcaggttgctggtagtaaaggaagaaaacatgttacttttgagccaggtgatatggtttggttgcacttgagaaaggatcggtttcctactttgcgccgttctaaattaatgcctcgtgctgctggtccttttaaggtgctaacaaagattaatgataatgcttatatccttgacctgcctgcggaatttggtgtttccactagttttaatgttgcagatttgaaaccatatatggccgaggatgagttgtcgtcgaggacgacttcacttcaagaaggggaggatgatgaggacatcactatgagtacgactacaccagcagcacctccacatcaagcgccacttccttcattagctgggccaatcactcgggcccgtgccagagatcttaacttcgtcatactactgaagaatgagggcccagaagaatagacgaccagcccaactgcggcccatagtggacgacctagggttgaccgcccctaggggctgcgccccctctatttatccaggagctgcgcctcctttattttcgagttttgttttatgttagccttagctactctcgaacacgcgcaaatctgcgctgtcttcgtgtattcagaactccaccatcgagtaatagattagattgctcgcatctttttcttgttcgttcttcgattgcgcacaggaaacgatcttcgtgatcaggccgatctcgcatcagcaaggtcggtaaccacagggagttggttcagcgattgcattggcgcctcgggcttgctcgtcgtagtcggatcgcaagggtcatcttccgccaaatcagaattatctctactcgccgaaagatcgggcacctcagctacatcatactcaccattttctcttataattagcacacacttgcttgggcaatcccttcggatgtgcccaaatcctttgcattagaggcattggatgtcctttgttcttcccgtggaagcaatagaagaagatttggttacagcttgggaggatcctttccctgtctcaatagcacgagaagatgcggatttcgatggtgttgtggatgatctattggaagcatctccctgaaacacatggttagagctagcagcactagtgtggggctgccaagatgtattgcgacctgcataagtgttagttctcaagcatcgtccctggacttctctttcagccttacaagcaagatgaaataagcgagtaacattagtgtattccttgtaagctaatatatcttgaatttctcttgtcaaaccacccatgaacctagccattgcagcttcttcattttctacgagaccacacctcaacatgcctatttgtaattgttgataatactcttcaacagatttgttgccttgtctaagctgttgtaatttatgtaataaatcacgagcatgataggaaggaacaaaacgactacgcatgattctttttaaagcattccaagtttgtggtatggtacctggatgtgtagtttggtactcatgccaccaaatagaagcaaaatcagtgaattcactcgtagcagctctaacctttttatcatcagaaaaatcatagcttgcaaatttttgatctaccgacaattcccatgttagatatgcatcaggatcatattttccatcaaacggtggtatggagaatttaattcttcctagagaatcatcattttcacgtatctcacgtcgtggaggtcgaccacccaagccatggcgatcacgtcgttggtgtcgtcggtgcctaatagatcggtcatcacgctcggtgtctgctgaatactccgtagcatcatctcttgcggtaccagcaatggaaccatggccatcatcatcaccttgttgcctaccttcacgcccaacttggtccatcctatctaagcgctcaataattgctgcaagagaggtgttagtagcagcaactgttcgttccaaagtggtcaatgtgttgttggtaacaatttgtgctgtttctaattgaccaatgcgctcattggtgacttcaacatcttcattgagggcatatgtgtgcaaccttacttgacgttcgaaatgttgaatgatgcccactgttcgtggagaatgtggaggtcgcgcatttgcatcctctgccatggttagtgcaaaagagatacaaaaacaagtaatgcagcctagtagttgctatgatatggaaggataaaaactgcctcactagcaagaaatcaagctcttacaagttctcaccacgcaaagcaagtggcgctggcaaacagcaagaagaacaataacagtggctgctagcacaacctggtggtgttgtagaaaaaattgtggatttataggtggctgctaaaacaatagttccaaggaatagctagtaccacgttagccacaacaagttgaataaacgttccacaatggtgctgtgctggtcctagtctaaaccgtaatagagacgcgagccgttacacaaatgatatcaccaaatactcaaaacagcaagctgacttataaaattgtgaaacggtggcacacaaactgtctttgatttgctgcacatggaattttatctaccaatattcttactgcgattttttctcttttttggacgtgcttttttttatgatcagcgcggctttttttctgcacttgccttttcctttcccttgttttttttgaactacagctagagaactaaaaatggtgatctaaacaagatggcgcgaactcgaaactctagcagcaagaaactttggaccagcaactcgacacaaatgcagcaaccgtgaattcaacaagtcaaaaaccaagtagtaaagcaaaggctcaaaatgtttttaggtgattttctgctctaaatatatctttggcaaaagtggactgtaggtaaataaaataaggaagatggagatctctcaccgagcaacctgaaatttgataccacatgatgaacccaacgggtagaagggtgcctgatctttcgatgagagatgatggaggtggaaaacttgttggagaacgacgttggctgcccgactaccacaaccaagatggtgttgcgccttgagcgacaggtacaccgtctcctgataactacgatttagtgtggaggtcgacgttgtgctatccgactacaaccaccacaagggtgctgcgccttagcgatagttacaccggctcctattgttgctgctcttgccgtgccaagaatagccttgaacctgcaagcaatcgagaacaagcaagaacaagataacaagcaaacacgcacggatctgataaagttggggtcccgtttcaagtattcgggtggtctagccgacacacgtgtttacaaggaagtagcaaaggctaaacttacatcaaacaaaacccaagttctttggtggctgctagttgcttaaatagagaaataggaagaaggaattctggtggagtcatgaagttccctcggcagttcctggacgcctcgggtgtagtctcccattaattcttgatccaccagcaagtagacgaaaggagctttccaacaagtatttatttccattaaacggccttggaagttggaagatatgccccatttaaacttgtacttggtgctgttacgaaatcctttcgggtgcagcagcctttattgccttgttgccttctccagtccaagatggttcacctcccaaacacctgagcataataaagtcatcgcaaggctttagtacctcatttaaagaagaattagcttcaatagcaaggaacgagttcacctgataattaagtttacgtgcacgggctcgtgtcattggtccttgattagctacgaatggtgaagtggtcactggtatggttgtatcaatgatagtgatgtcctcatcagcttgtaaggctgaaagagaagtccagggacgatgctttagaactaacacttatgcaggtcgcaatacatcttggcagtcccgcactagtgctgctagctctaaccatgtgtttcagggagatgcttccaatagatcatccacaacaccatcgaaatcagcaccttctcgtgctattgagacagggaaaggatcctcccaagctgtagccaaatcttcttctattgcttccacgggaagaacaaaggacatccaatgcctccaatgcaaagaatttggtcacatccgaagggattgcccaagcaagcgtgtgctaattataagagaaaatggtgagtactgcgatttagataatgatacatatgccatgcttgctggccaagatgctgaaaaggagaatgatgatgaagagcatattgaggctgaacgtgctgaacactatgagagcctcattgtaagacgtgtcttgagtgcccaaattattaaagctgaacaaaaccagcgacacaatttcttccaaactaaatgtgtagttttggaacgatcttgtcgtattataattgatggaggaagctgcaacaacttagcaagcaccaccatggtagagaagcttgggctgaaaacgcttctgatgtagctgaggtgcccgatctttcggcgagtagagataattccgatttggcggaagttgacccttgcgatccgactacgacgagcaagcccgaggcgccaatgcaatcgctgaaccaactccctgtggttaccgaccttgctgatgcgagatcggcctgatcacgaagatcgtttcctgtgcgcaatcgaagaacgaacaagaaaaagatgcgagcaatctaatctattactcgagggtggagttctgaatacatgaagacagcgcagatttgcgcgtgttcgagagtagctaaagctaacgtaaaacaaaactcggaaaataaaggaggcgcagctcctgtataaatagagagggggcgcagcccctaggggcggccaaccctaggtcgtccattatgggccgcaattgggctggtcgtctattcttccgggccttcgttctttaacaacatgatgtagttcaattctcttgcacgggcccgagtcactggcccaggtggaaggggtggcgcctggactggggaagatggtgcctgggctggagaaggtgctgctggtgtagatgtgctcgtgttggtgttgatgtcctcatcatcctccccttcttgaactgaagtcgtcctcgacggcaactcctcatcttctcccgcatacggtttcaaatctgcaacattaaaactagtggaaacaccaaactccgcaggcaggtcaaggatataagcattatcattaatcttggttagtaccttaaaaggaccagcagcacgaggcatcaatttagaacggcgcaaagtaggaaaacgatcctttctcaaatgcaaccaaaccatatcaccaggttcaaaagtaactagtttccggcctttactaccagtaatctgatatttagcattagcagcagcaatgttttgttgagtttgttcatggagattaatcatttgttcaacatgtgcaagagcatctatgtgtggggcgtccgtagcatcaagcgaaaacaaagcaataggcgccctaggaatgtaaccataaacaatttgaaaagggcacatctttgtagaagaatgtgttgcatgattataagcaaactcaacatgaggtaagcaatcctcccaacgtttcaaatttttgtctaaaacagccctaagcatggtagacagagttcgattaactacctcagtttgaccatcagtctgagggtgacaagtggtgctaaacagcaatttagttcctaatttattccacagagatctccaaaaatgactcagaaacttggcatcacgatccgagactattgtattgggaataccgtgcaaacgaataatctctctaaaaaacaattcagcaacattgctagcatcatcagtcttatgacaaggtatgaaatgagccattttggagaatcgatcaacaaccacaaaaatgctatccctccccttcttagttctaggcaatcccaaaacaaaatccatcgaaatatcaatccaaggggaagtaggaacaggcaaaggcatatacaaaccatggttgttcaaccgtgacttagctttctgacaagtagtgcagcgtgcaacaaggcgctcaacatcagcgcgcatccgaggccaaaagaagtgggcagccaacacctcatgtgtcttgtagacgccaaagtgccccatgagaccgcctccatgtgcttcctgtaacaacaaaagacgaaccgagctagctggaacacacagcttgttagcgcgaaacaggaacccatcctgtatgtgaaatttgccccatggtttcccattaatacaatggccgaaagcatctttaaaatcagcatcgtcaacatattgatcttttacagtgtgcaaaccaaagattttaaaatctaactgtgacagcatggtatagcgacgagacaaagcatcagcaataacattgtccttcccgttcttgtgtttaataatgtaaggaaaagactcaatgaattcgacccatttagcatgacgacggttcagatttgtttgggtacgaatatgttttaaagcctcatgatcagaatgaattatgaactcacgatgccaaagatagtgctgccatgtatgtaaagtgcgcactaacgcgtaaagctccttatcataagtagaatatttcagactagcaccgcttaatttttcactaaaataagcaactggttttccttcttgtaataaaacagcacctagcccaataccgctagcatcgcattcaagctcaaatactgtattaaaatcaggcaattgcaataggggagcttgggttaacttatctttcagagtgctgaacgcttcctcctgcgaatcactccaagcaaatggcacatctttctttgtaagctcatgtagaggcgctgcaatggagctaaaatcacgaacaaatctgcggtagaaaccggcaagtccaagaaagctctgaatttgtgtgaccgtcgtcggtgtaggccactcccgaatggcagcaatcttgctgctatccacctcaatgccctgtggagtaacaacataaccaagaaacgagacacgtcgtgtgcaaaagatgcatttttccatgttagcgaataactgggcggcacgcaatgcatcaaaaacatcacttaaatgttccaaatgctctttcttagatttgctgtaaataaggatatcatcgaaataaacaaccacaaacaatcctatgaagggcctcagaacttcattcatcactcgcataaaagtgctgggagcattagtcaatccaaacggcataaccaaccattcatataaaccaaatttcattttgaaggctgttttccattcatcacccagtttcattctaatctggtggtaaccactacgcaaatcaatcttagtaaaaataatggcaccactaagctcatctagcatatcatcaaggcgtggtataggatagcgataacgaatagtgatattattaatagcacgacagtctacacacatacgccatgacccatccttcttgggaacaagtaacacaggaacagagcaagggctaagagactcacgaatgtatcctttgtcaagcaacgcctgtatctggcgctgaatctccttcgtctcatccggatttgtacggtatggtgcgcggtttggaagctgtgcaccgggaatgaggtcgatctggtgctcaatgccacgaagcggtgggagacccggtggtaagtctttgggaaagacatcagcgtactcctgcaaaaggttagcaaccatagggggaatagccaaagatggtgcatcatcaagtgaaatgaggacactagagcatacaagtgcatagcatggcaaatgagcaccgtg

SEQ ID NO: 649 - DNA, 13130 bp, Zea mays
  source (0)...(0): Zea mays BAC clone full insert sequence contig bacm.pk108.h15-2.fis46
caacacgaaaccagcaacaaatgacgcgaaagcacacaaattcaacaatgcagattattgaaagaaagtgcgagactcaaaagggtgctgggataaggtctaacctgaatttttatgtggttttgtggactgtaggaaaaaaacactcgataaactcaccgatcaacctggaaatctgataccaattgatgtagctgaggtgcccgatctttcggtgagaggagataattccgatttggcggaagatgacccttgcgatccgactacgacgagcaagcccgaggcgccaatgcaatcgctgaaccaactccctgtggttaccgaccatgctgatgcgagatcggcctgatcacgaagatcgtttcctgtgcgcaatcgaagaacgaacaagaaaaagatgcgagcaatctaatctattactcgagggtggagttctgaatacacgaagacagcgcagatttgcgcgtgttcgagagtagctaaggctaacgtaaaacaaaactcgaagaataaaggaggcgcagctcctgtttaaatagagagggggcgcagcccctaggggcggccaaccctaggtcgtccactatgggccgcagttgggctggtcatctattcttctgggccctcattcttcagtagcatgacgaagttaagatctctggcacgggcccgagtgattggcccagctaatgaaggaagtggcgcttgatgttgaggtgctgctggtgtggtcgtactcatagtgatgtcctcatcacaatcctctactttaggtccaaaactcatgtttggggtggtttcgcgcaatttcgttgccgcacgtcactcattccgaaaacgggtgtcggggtgcatacaaagcacgagtttttgccaccggaaccatttctttgtttttcgcaacgaacatgccgaatccactactttaggtccaaaactcatgtttggggtggtttcacgcgatttcattgccgcacgtcacccattccgaaaacgggtgacagggtgcatacaagcacgagtttttgccaccggaaccatttcttcgtttttcgcaacgaacatgccctccactactttaggtccaaactcatgtttggggtggtttcgcgcaatttcattgccgcacgtcacccattccgaaaatgggtgtcggggtgcatacaagcacgggattttgacaccggaaccatttcttcgtttttcgcaacgaacatgcccaatccactactttaggtccaaaactcatgtttggggtggtttcgcgcaatttcattgctgcacgtcacccattccgaaaacgggtgtcggggtgcatacaagcacgagtttttgccaccggaaccatttcttcgtttttcgcaaccaacatgcccaatccactactttaggtccaaaactcatgtttggggtggtttcgcgcaatttcattgccgcacgtcacccattccgaaaacgggtgtcggggtgcatacaaagcacgagtttttgccaccggaaccatttcttcgtttttcgcaacgaacatgcccaatccactactttaggtccaaaactcatgtttggggtggtttcgcgcaatttcattgccgcacgtcacccattccgaaaatgggtgtcggggtgcatacaaagcacgggatttttgccaccgggaacatttcttcgtttttcgcaacgaacatgcccaatccactactttaggtccaaaactcatgtttggggtggtttcgcgcaatttcattgtcgcacgtcacccattccgaaaatgggtgtcggggtgcatacaagcacgcgtttttgccaccggaaccatttcttcgtttttcgcaaccaacatgcccagtccactactttaggtccaaaattcatgtttggggtggtttcgcgcaatttcattgccgcacgtcacccattccgaaaacggttgtcgaggtgcatacaaagcatgagtttttgccaccggaactatttcttcgtttttcgcaacgaacatgcccaatccactactttaggtccaaaactcatatttggggtggtttcgcgtaatttcattgccgcacgtcacccattccgaaaacgggtgtcgaggttcatacaagctcgagtttttgccaccggaaccatttcttcgtttttcgcaacgaacatgcccaatccactactttaggtccaaaactcatatttggggtggtttcgcgcaatttccttgccgcacgtcactcattccaaaaacgggtgtcgaggtgcatacaagcacgagatttttgccaccagaaccatttcttcatttttcgcaacgaacatgcccaatccactactttaggtccaaaactcatgtttggggtggtttcgcgcaatttcgttgtcgcacgtcacccattctgaaaagggttgtcgggtgcatacaaagcacgagtttttgccaccggaaccatttcttcgtttttcgcaaagaacatgcccaatccactacttttggtccaaaattcatgtttggggtggtttcacgcaatttcgttgccgcacgtcacccattccgaaaacgagtgtcgggtgcataaaagcacgagtttttgccaccggaaccatttcttcgttttccgcaacgaacgtgcccattccactactttaggtcctaaactcatgtttggggtggtttcacgcaatttcgttgtcgcacgtcacccattccgaaaacgggtgtcgcgtgcataaaagctcgagtttttgccaccggaaccatttcttcgtttttcgcaacgaacatgcccaatccactactttaggtccaaaactcatgtttggggtgatttcgctcaatttctttgtcgcacgtcacccattccgaaaacgggtgtcgggtgcataaaagcacgagtttttgccaccagaaccatttcttcgtttttcacaacgaacatgcccaatccactactttaggtccaaaactcatgtttgggttggtttcgcgcaatttcgttgtcgcacgtcacccattccgaaaacgggtgtcgggtgcatacaaagcaccattttttgccaccggaaccatttcttcgtttttcgcaacgtttatgccgaatccactactttaggtccaaaacacatgtttggggtggtttcgcacaattttattgcagcggtttcgcgcgatttcattgtcgcacgtcacccattccgaaaacgggtgtcggggtgcatacaagcacgagtttttgccaccggaaccatttcttcgtttttcgcaacgaacataaccaatccactactttaggtccaaaactcatgtttgcggtggtttcgcgcaatttcattgccgcacgtcacccattccgaaaacgggtgtcggggtgcatacaaagcacgagtttttgccacaggaacaatattttcgttttttcccaacgaacatgcccaatccactactttaggtccaaaacgcatgtttggggtggtttcgcacaatttcgttgcagcacgtcacccattctgaaaacaggtgtcgggtgcatacaagcaccagtttttgccaccggaaccatttcttcgtttttcgcaacgaacatgccgaatccactattttaggtccaaaacacatgtttgggttggtttcgcgcaattttattgccgcacgtaaccaattccgaaaacgggtgtcgggttgcatacaagcacgagtttttgccaccggaaccatttcttcgtttttcgcaacgaacatgccccatccactactttaggtccaaaactcatgtttgcggtggtttcgcgcaatttcattgccgcacgtcacccattccgaaaacgggtgtcgggtgcatacaagcacgagtttttgccaccggaaccatttcttcgtttttcgcaacgaacatgcccaatccactactttaggtccaaaactcatgtttggggtcgtttcgcgcaatttcattgccgcacgtcacccattccgaaaacgggtgtcgggggtgcatacaagcacgagtttttgccaccggaaccatttcttcgtttttcccaacgaacatgcccaatccactactttaggtccaaaacacatgtttggggtggtttcgcgcaatttcattgccgcacgtcactcattccgaaaacgggtgtcggggggcatacaaagcgcgagtttttgccaccggaaccatttcttcgttttttcccaacgaacatgcccaatccactactttaggtccaaaacgcatgtttggggtggtttcgcacaatttcgttgcagcacgtcacccattccgaaaacaggtgtcgtgttgcatacaagcacgagtttttgccaccggaaccatttcttcgtttttcgcaacgaacatgcccaatccactactttaggtccaaaacacatgtttggggtagtttcgcgcgatttcattcccgcacgtcacccattccgaaaacgggtgtcggggtgcatacaagcacgagtttttgccaccggaaccatttcttcgtttttcgcaacgaacatgcccaatccactactttaggtccaaaactcatgtttgcggtggtttcgcgcaatttcattgccgtacgtcacccattccgaaaacgggtgtcgggtgcatacaagcacgagtttttgccaccggaaccatttcttcgtttttcgcaacgaacatgcccattccactactttaggtccaaaactcatgtttggggtggtttcgcgcaatttcgttgccgcacgtcactcattccgaaaacgggtgtcgggggtgcatacaagcacgagtttttgccaccggaaccatttctttgtttttcccaaggaacatgcccaatccactactttaggtccaaaactcatgtttggggtggtttcgcgcaatttcgttgccgcacgtcactcattcagaaaacgggtgtcggggtgcatacaaagcacgagtttttgccaccggaaccatttcttcgtttttcgcaacgaacatgccgaatccactactttaggtccaaaacacatgtttggggtggtttcgcacaattttattgcagcggtttcgcgcgatttcattgtcgcacgtcacccattccgaaaacgggtgtcggggtgcatacaagcacgagtttttgccaccggaaccatttcttcgtttttcgcaacgaacataaccaatccactactttaggtccaaaacttatgtttgcggtggtttcgcgcaatttcattgccgcacgtcacccattccgaaaacgggtgtcggggtgcatacaagcacaagtttttgccactggaaccatttcttcgtttttcgcaacgaacatgcccaatccactactttaggtccaaaactcatgtttggggtggtttcgcgcaatttcgttgccgcacgtcactcattccgaaaacgggtgtcggggtgcatacaaagcgcgagtttttgccacaggaacaatattttcgttttttcccaacgaacatgcccaatccactactttaggtccaaaacgcatgtttggggtggtttcgcacaatttcgttgcagcacgtcacccattctgaaaacaggtgtcgggtgcatacaagcaccagtttttgccaccggaaccatttcttcgttttttcgcaacgaacatgccgaatccactattttaggtccaaaacacatgtttgggttggtttcgcgcaatttcattgccgcacgtcacccattccgaaaacaggtgtcggggtgcatacaaagcacgagtttttgccaccggaaccatttctttgtttttcgcaacgaacatgcccaatccactactttaggtccaaaactcatgtttggggtagtttcgtgcaatttcgttgccacacgtcacccattccgaaaacgggtatcggggtgcatacaagcacgagtttttgccaccggaaccatttcttcgtatttcgcaaggaacatgcccaatccactactttaggtccaaaactcatgtttggggtggtttcacgcaatttcgttgccgcacgtcactcattccgaaaatgggtgtcgggtgcataaaaagcacgagtttttgccaccggaaccatttcttcgtttttcccaacgaacatgcccaatccactactttaggtccaaaacacatgtttggggtggtttcgcacaatttcgttgccgcacatcacccattccgaaaacgggtgtcggggtgcatacaagcacgagtttttgccacaggaaccattttttcgtttttcgcaatgaacatgtccatccacttctttaggtccaaaacacatgtttggggtggtttcgcgcaatttcgttgccgcacgtcattcattccaaaaacgggtgtcggggtgcatacaaagcacgagtttttgccaccgtaaccatttcttcgtttttcccaacgaacatgcccaatccactactttacgtccaaaacacatgtttgggttggtttcgcgcaatttcatttacttgatagaccgtggcagtatgatactgatagtttacatcatggtcgttcgaatcattattctttcttgtttaagggtcagaaaataatatccatcccataacccctgaccaaattataaaagatgatcttgctcgggctacaaaaactgcaaagcaacatgcacctactccatccacccctattaatgctgaaatcaagttgcatgctcctgttttacttgctacacgtgctgattttgatgacctacgtgatactcacttgccctgctatgcgcttgtatgttctagtatgctcgtttcacttgatgatgcccgccttaggatattccccttgctgtttctaaacttttgcaggagtacgctgatgttttctccacggacttgccatcgggtcttcccccgcttcgtggcattgaacaccagatcgacctcatccccggcgcccagcttccaaaccgtgccccgtaccttacgaatccggatgagatgaaggagatccagcgccaggtgcaggcattgcttgataaaggttagattcgtgaatctcttagtccttgctcagttccagttttacttgttccaaagaaagatgggtcatggcgtatgtgtgtcgactgtcgcgctattaataacatcacaattcgttatcgatatcctataccatgccttgatgatatgctagatgagcatagtagtgccattatttttactaagattgatttgtgtagtgggtaccatcagattcgaatgaaactgggtgatgaatggaaaacaacttttaaaacgaagtttaggttatatgaatggttggttatgccgtttggattgagtaatgctccaagcacctttatgcgtttgatgaacaaagttctaaggaccttcataggattgtttgtcgttgtctattttgatgatatccttatttacaacaagactatggaagagcatttcaaacatttgagtgttgtttttgatgcgttgtgtactgcccgcttgatgaagacatccacactactgatgcatctataccaatacaagtaccaatttctggtcccattactcgcgctcgtgctcgtcaactcaaccatcaggtgattacactcttgagttcatgtccatcatatttagaccatggagacccgtgcactcttgttttgcttaggaatcagggagaagaccgaaagggaaaaggatttgaacatgctggattcggactgcagaagaacaccaacttgtgacggtcaccacggtcagatgcgggctcggattggaatgttcaagcacaacatgaggtgaggcgcgcccgggaaggctttataggcgcgggcgggcacggccgagggcgaggctctgacaagtgctcggggcgtgcgcgggagaacgccagtgcgcgctctagcgcctggcacagcgtcgagcacgagacagcgcaattagggttggtattagggtttcaacacttttccctttttgaaaaaccttatttgtttggaacatggttctttagatatacacttagtagatcttttcttctcaagttaatttgatgcttcatgcttaatttggctcacataaaatgttaatacttgggttagcactgagagaaaccctaggtgacactggggtgtcacaaccttccccccttaaaggaatctcgtcccgagattcgggtcagagtccttccggggtgaagcgaagggtgagacttacaagaagtgggtgctctattattagggcaaactgctcttcgaatgtcattctctttgcaacttcagaaggaagtccttttaaattttgattcataattacttcattctgatctaagattatatttctgaaatttagattcgaagggcaggaggaggggttgggtatgattacgtaccaatttccttaggtaggtaatcggggaagttggatcgcaagaattcctcagtctcccaagtagcctcttcctctgagtaattactccactggaccttatacaacttgattgatttagcccgagttgatctttccttgcaatccagaatcttggaagggtactcttggtacgatagatctggctctatctccaattctggttctgctatgatctcggtcggcaatcgaacacacttcttcaactgagacacatggaacacattgtggatgacacacatttttggaggtaacttcaatttatatgccacgagtccacatgcttctatgatctcataaggtccaatgtaatgaggggctagcttgcctttgattccaaacctctgcactcccttggtgggtgatactttcaaatacacgaaatctcccacctcgaactggagaggtttccttctcttatcatggtaactcttctgcctggcctgagcagcttctagattcttcctgattagtttgaccttcctttcggcttcagtcactaagtcaggtccgaaaacttctctttctccaggctgagaccaattgagtggtgttctacaccttcttccatagagacctttgaaaggtgccatccttaggctggattgataactgttgttatcactactacaaaacatgttatatgagacggttaatttttagttcttaagacgcttatgaagtgtccaaatttgatggagtcgtaaaagatgtcccacatttaagatggttataaaccgtattaaaagatattatataagacaatttttaatttataaccgtctgaaaaaggtatttgtttaagtcattttttccgataaaccatcttgaattaggtttttgtttaagacactgcttctaaagaaccgtagagaatacaaacattataagtcataaagtatttatcaaactgtctcgaatatcctacaataatagacgattacaataggaaaaccatcttatttaggtgactaataatggacgttttagaaactatcttatttaggagactgatattagacattttggtgaccgtcttattaagatttaaacgaaatgacttacacggcagtacattcttcaatttataatcatttttagatatcatgttataataatttgaaagagaaatatacatacacatatattgaacaacattataattaatataatataaataagtatcattcaatatatcataaataagcattgtcaaacaacgcatacataagtgtactctaaatctaaactaaaatacaactgtttgcactaatgttaagcctaactttatatgaattcaagtctccacactttggggccaccaaatttgaattccattgtatgttttcctgtacaacaaataggagaaaactagacatagcaaaaagctccaaacaacacgtggatggtctcgaagctgcccactacttctccctgttcttgatcactcctacacgcccggtgttcctcccgccggtcaccatgaccacattgccgacgtcaaacttgatgaagtccatgatcttgttggtctccagatcgatcttgatggtaccatttctgcaaacttttagctgtacagaagggatattgtgtttggagtaaagaacgaccaacctcaccacatatggactcaaagaataactttagatctgcttgagtgacctgcgtgtattaaaacagaaccatgacagaatgaataactacaggtagtagcatgaatgcaggtaccaaaccttcttgtcaatgtttgtgcggtagatagtccttgcacacatttcacgttcatcgtcagtctgcagagcacagaaaataagtatatatgtcatgtaggattggcaacacaaccttagtatctcagtttggaacagcagaaacagggtggcaatagtatgttttgtttgacagatcattttatattcctattttccaaaatgcaaaattcagtctgatgaaatcgaagaagtctagcctttttctagaagtgaagggctagacccagtttcatatatcagatttcattattcaagcatggtgccagtatgtttagtgctttatcagataaaattatcttatatgctggcactattgagaaatgattaataatatgatatatgattaaaaatgtaaattacagacattaaaacagatgccgaggctttcaagttctcaccctccagataaaccaaaatatgcttttatttgagccacattccaataggtattctctcccttagattccttaattgcttgctctaagagagcgcaggccgcgatatgtgctcctgctgattgacccatcaagtagattctacagattcatcataaattcatttattaaaagttaacaatcaaaatacaggatctaaagtagagatgctcaaagaacaactgtaagtactactacttgcaaacaaatgtcaaagtatctgatgaggacatcaacaccaacacgagtacatctacaccagcagcaccttctctagcccaggcaccatcttccccagtccaggcgccaccccttccacctgggccagtgactcgggcccgtgcaagagaattgaactacatcatgctgttaaagaacgaaggcccagaagattagaagatggcccaacaggaaggcccggatggggcgcctagggaagtcgtgaacagtaaccgtggtactgtagcgccggccctactgttcacgcctctcctctatttagtcagaatcctgtttcatttagaacttgagttttgttttacatctagctttagctaccccagaacacgcacaaatacgtgctgtcctctgtgattcagaactccacctcgagtgatattaagattgctcgcatctttttcttgttcgttcttcgattgcgcacaggaaacgatcttcgtgatcaggtcgatctcgcatcagcaaggtcagtaaccattgggagttggttcagcgattgcattggcgcttcgggttcgctcgtcgtagtcggatcgtgagggtctacttcaaccaaatcggaattatctccactaaccgaaagatcgggcactccagctctatcaagtggtatcagatttccaggttgatcggtgagtttatcgagtgttttttctcctatagtccacaaaaccacataaaaatttaggttagaccttatcccagcacccttttgagcctcgcactttctttcaataatctacatcgttgaatttgtgtgctttcacatcatttgttgctggttgcattgtgttattccaccattcaaaccctagcgtgccgccaccatatttcgtttgatcacgccataaaccgagtcaacgccacttccttatttttctccttcggttacataaaaaaacagaaaaaaaacaaaccgagtcaacgccgcttccttgtttttctccttcggttacgtaaaaaaaaacagaaacaaaaaaaagaaaacgaaggagaaaggatacaaagcggttgtctcatctcggtcgttttaaacataccttccttaaaccgggcataacttttcgctcggttgttcaaaaaatctgaaatttttacaggagcttattgacaccattctgaggcctgtttggtttcgataaaattgtcaaaaaaaattcaggaaaataaagaaaaaaattcgtcaaagttctcgcacgcttttcagagaacttcctgattttctgtagaccacatctgaactctgttttaggtgaaacttcgtgtagctcctattttgttgctccttgtgctgagaaaaatatcaaaaaatcatacaaaaaagaaaaacaaaatcacatgtgattcctactagtgcatttttggcctcgctagtataatatttacggtactgccattctgctagttccatctgtcctttgcacttgtgcccagcaatatagtttcgtgttttgcactataattcaactttgcattattgtttgatcgtgctaatctttgacttgagtgcagcctacccaaaactccacatatttctacgacgagaaggattctgtttctccaggcaatcgctcatccaatctttcaccggttacacctgttggttgcaaatcaccactgtggcttggtaagaacggataagaacttgataacatcattccattgagcgagttgtcaccaccatttccctgttgtcgttggtttttctccttttcgtgttttggtgtttgcgctaactatggcaggagcacacgacacggtggatgccctcatgttgagtttgcttataatcatgcaacccattcttctacaaagatgtgcccttttcaaattgtttatggttacattcctagggcgcctattgctttgttttcacttgatgctgcggacgccccacacatagatgctcttgcacatgttgaacaaatgattaatctccatgaacaaactcaacaaaacattgctgctgctaatgctaaatatcagattactggtagtaaaggccggaaactagttacttttcaacctggtgatatggtttggttgcatttgagaaaggatcgttttcctactttgcgtcgttctaaattgatgcctcgtgctgctggtccttttaagatactaaccaagattaatgataatgcttataccctcgacctgcctgcggagtttggtgtttccactagttttaatgttgcagatttgaaaccgtatgcgggagaagacaaggagttgccgtcgaggacgacttcagttcaagaaggggaggaatcggaaaatcgataccgtcgaccccctttttattatga

SEQ ID NO: 650 - DNA, 16983 bp, Zea mays
  source (0)...(0): Zea mays BAC clone full insert sequence contig bacm.pk108.h15-2.fis47
  misc_feature (1)...(16983): n = A,T,C or G
catcaggcctttgcagctttgtgctgatgggggttaccagctgaaagaattaggagccttgagggtacccctaattatgggtccccgacagtagcccccgagcctcgaagggagtgttagcactcgcttggaggctttcgtcgcacttttttgcaaggggaccagcctttctcggttgcgttttgtttcggtgggtgcgcgcgagcgcacccgccgggtgtagcccccgaggcctcggaggagtggtttcactccttcgaggtcttaatgcctcgcgtaatgcttcggctggtctggtcgttccctcatgcgagctggccgtagcccgggtgtacggtcgggtcccaagttctcgggctggtatgttgacgctgtcaacggttcggccggagccgggtttgcgagagcagcccccgagcctccgcacaaggcgagagggcgatcagggacagactcggcttttttacatacgcccctgcgtcgcctttccgcaaggaggagggggggaaagcgccatgttgccctcgatgggcgccgaacatggtgtctctggtgagctgcaagagggtaatccgagtggacgtccgtgccccgttcgttaggggtcggctaggggcccagaggcacgcccaaaagtacctgcgggtgatctgtcggacccggtcccctggcaacggggtccgagggctcaatgcctccctctgatgggattccgttacaagatcgttcccgctggtctcggaaatgtcctagggtacctcgggagcgcagcccaagccttggttatgtatcgaacgtacccatggtcatccctcgctcggagtttgaggcggctgtgaacccttcgggggccagccttcgaacccctgatcagtaatgggcgcggagcccgagtagcctgaggcggccgtggaacccttccgaggggccggccttcgaacctctgaccagtagtgggtgtagggcccacacgatctgaggcggctgtcgaacccttccggggggccagccttcgaacctctaatcagtagagaggctcagagcctagttccttcacggggaaggatccttttcggggtatccccctttcccggtccctgttgcaagagagagaaagaggaaaaaaggaaaaggatacgaaatcgaacgacgcggcgtaccttttttgacgcggtcattatggcgaaggcgaagcgtcgccagcttctcctgccaggggcgccgcctgtcccgccgcggagttaatgcgacggggcgagtggttggcggggcggccgttgcgcatgcgcgagccgttcgaggaacggagcacgggcgcgttgtcttcacgtcgtgagagagggttctcttgctgcccccggatggggcgtgagcttgtgccgccctcgggcgtcttgtcgcagccgaagcaccaggtcgcccacctagaggtctcgggaccggacccctcgggcgtggtagcgtcgcagggactgctggtaccgcgctgagtgtagtaaggccttgtcccgagcctcctccagctggtccaacgagtcttctcggctagcttggttgctttggtcggtgtaggccctcgtcctcggggagccgtattccaggtctgtgggcaagacggcctcgaccccgtagactaggaagaacggcgtgaagcccgtggttcggctcggcgttgtcctcagactccagaccaccgaggggagttccttcatccatcgcttgccgaacttgttgaggtcattgtagatccgaggctgagcccttgcagaatcatgccgttggcacgctctacttgcccatttgacatggggtgagctacggcggcctagtccacccggatgtggtgatccccgcagaagtccaggaactttctgccggtgaactgggtgccgttgtcggtgatgatggagtttgggaccccgaagcgatggatgatgttggtgaagaacgccattgcctgttcggacctgatgctgtttaggggtcggacctcgatccacttggagaatttgtcgatggcgaccagcaggtgcgtgtagcccccgggtgccttctgcaaggggccgacgagatccagaccccacacagcaaaaggccaggtgatgggcatcgtctgcagagcctgagcgggcaggtgggtctgccttgcgtagaactgacacccttcgcaggtgcgaacaattctagtggcgtcggccactgccgtcggccagtagaagccttgtcggaaagcattcccgacaagggctcgaggcgctgcgtgatggccgcaagcccccgagtgtatctctcgcaggagttcctgaccttcggcgatggagatgcatcgctggaggatgccagaggggctacggtggtagagctccttctcatcgcccagcaagacgaacgacttggcgcgtcgcgccaaccgccgagcctcggctcggtcgaggggtagctctcctcagtggagatattgcaggtacggggtccgccagttttgattaggcgtgaccccgcttcgctcctcctcgacgcgcagtgcctcaccctcgggtgccgagggtgcctcgggctgagccgagggtggctcgggccgggctgagggtgcctcgggccgtgccgaagatacctcggactgagccgaggttacctcgggctgggccgagggtgccttgggctcgggcgtgtcgtcgatcttgatggagggttgatgtaggtctcgggagaagacgtccggggaaccattgttcgccccgaggctattttagccagctcgtccgcagtctcgttgtagcgccgggcgatgtggctgagctcgagcccgtagaatttgtcctccaggcgccgaacctcatcgcagtaggcctccatcttcgggtcgcggcagtgggagttcttcatgacttggtcgatgacgagctgcgagtcaccgcgagcgtcgaggcgtcggacccctagctcgatggcgatccgcaacccgttgaccagagcctcatactcagccacattgttggacgcagggaaatggaggcgtagcacatagcgtatgtgtttcccgaggggcgagatgaagagtaggcctgcgccggctcccgtcttcatcaacgacccgtcgaagaacatggtccagagcttcggttggatcggagccgtcggtagctgggtgtcgacccattcggccacgaagtccgccaagacctgggacttgatggccttccgaggggcgaacgagattgtctcgcccatgatttccaccgcccactttgcaatcctacccgaggcctctcggcactggatgatctcccccagggggaaggatgacaccacggttaccggatgagactcgaagtagtgtcgcaacttccgccgtgtcaggatcactgcatacagcagcttctgaacttgtgggtagcagatcttggtttcggacagtacctcgctgacgaagtaaactggcctctgaacgggcaatgcatgcccctcttcttgcctctcgaccacaatcgcggcgctaaccacctgagtggtcgcggcgacgtagaccaagagggcttctccggcagctaggggcaccaggataggcgcctttgtgaggagcgccttcaagttcccgagggcttcctcggcctcaggggtccaagtgaagcactcggccttcctcaagaggcggtacagaggtagacctctttcgccgaggcgtgagatgaagcggctcagagccgcgagacatcccatgaccctctgtacgcctttcaagtccttgatgggccccatgctggtgatggctgcgatcttctccgggttggcttcgatgccccgctcggagacgatgaaccccaagagcatgcctcggggcaccccgaagacacacttctcgggattgagcttgacgcctttcgccttgagacatcggaatgtcacttcaaggtcggaaaggaggtcagaagctttcctcgtcttgactacgatgtcatcgacgtaggcctcaaccgtgcggccaatgtgttcgccgaacacatggttcatgcaccgctggtacgtcgcgcccgcattcctcaagccgaacggcatggtgacatagcagtacatgccgaagggtgtgatgaaagaagtcgcgagctggtcggactctttcatcctgatttgatgataccctgagtaggcatcgaggaaagacagggtttcgcacccagcagtggaatccacgatttgatcgatgcgaggcagagggtagggaaccttcggacatgctttgttgagaccagtgtagtctacacacatccgccatttcccccctttctttctcacaagcacagggttggcaagccattcaggatggaatacctctttgatgaaccctgccgccattagcttgtggatctcctcgcctatggctctgcgcttctcctcgtcgaatcggcgcagaggctgcttgacgggtcgggctccggctcggatgtccagtgagtgctcggcgacatccctcggtatgccaggcatgtccgagggactccacgcaaaaacgtcggcgttcgcgcggagaaagtcgacgagcactgcttcctatttgggatcgagcccggagccgatccggatctgcttggaggcgtcgccgctggggtcgaaggggatggacttaaccgtctccgctggctcaaagttgccggcatgacgcttcacgtctggcacctccttcgagaggctctccaggtcggcgatgagggcctcggactcggcgagggcctcggcgtactccacgcactccacgtcgcattcgaacgcgtgtttgtacgtggggccgacggtgatgatcccgttggggcccgacatcttgagcttcaggtaggtgtagttggggacgaccatgaacttcgcgtagcacggtcttcccagcacagcgtggtaggttcctctgaacccgaccacctcgaacgtcagggtctcccttcggaagttggagggtgttccgaagcagacaggaagctcgagttgtccgaggggctggacgcgcttcccgggaatgatcccatggaagggcgcagcgcctgctcggacggaggacagatcgacacgcaggagcccgagggtctcggcgtagacgatgttgaggctgctgcctccgtcaatgaggaccttggtgagcctgacgttgctgatgacggggtcgacgacgagcgggtatttccccggactcggcacatggtcggggtggtcggcctggtcgaaggtgatgggcttgtcggaccagtctaggtagactggcgccgccaccttcaccgagcagacctcccgacgctcttgcttgcggtgccgagccgaggcgttcgccacttgcccaccgtagatcatgaagcagtcgcggacctcggggaactctcctgcttggtgatcttccttcttatcatcgtcgcgggccctgccaccctccgcgggtggcccggccctgtggaagtggcgccggagcatgacgcactcctcaagggtgtgcttgacgggcccctggtgataggggcacggctccttgagcatcttgtcgaagaggttggcacctcctgggggtttccgagggttcttgtactcggcggcggcgacaaggtccgcgtcggcggcgtcgcgtttcgcttgcgacttcttcttgcccttcttcttggcgccgcgctgagttgacgcctcgggagcatcttccgatgggcggccctggggctacttgtcctttcggaagatagcctcgaccgcctcctggccggaggcgaacttggtggcgatgtccatcagctcgctcgtcctggtgggggtcttgcgacccagcttgctcaccaggtcgcggcaggtggtgccggcgaggaacgcgccgatgacatctgagtcggtgatgttgggcagctcggtgcgctgcttcgagaatcgccggatgtagtcccggagagactctcccggctgctgccggcagcttcggaggtcccaggaattcccgaggcgcatgtacgtgccctggaaattgccggcaaaagcttggactaggtcgtcccagctggagatctgccccggaggcaggtgctccaaccaggcacgagcggtgtcggagaggaacagggggaggttgcggatgatgaggttgtcatcgtccgttccacccagttggcaggccagacggtagtccgcgagccacagttccggtctcgtctcccccgagtactttgtgatagtggtcgggggtcggaaccgggtctggaacggtgcccgtcggatggcccggctgaaggcctgcggaccgggtggttcgggcgagggactccgatcctccccgctgtcgtagcgtcccccacgcctggggtggtagcctcggcgcaccctctcgtcgaggtgggcccgacggtcgcggtgatggtgctcgttgccgaggcggcccggggccacaggcgtggtgttgcgcgtgcgcccggtgtagaccgaggcttcccacatgaatcgggaagtcgtggcataaggttccgaggggtacccctgccttcgggaggcagagctctcggcccgtcggaccgcggcgccttccaggagattcttgagctccccctggattcgccggccctcggtggttgatggctccggcatcgcgcggagaagcgctgctgcagccaggttctggccgaccccactagatgcgggtggtggcctgaccctgacgtcgtcggcgacgcggtgctggaagccctggggcagatgacgtatttctccggccgggggttggcccgcccatgcctgcccgacgtcccggcggatcggctcaagcgctcctgctccctcgtcgagcctggcctgcaccccgcggatttgctcgagctgtgggtcatgcccccccgtctgaacggggaccacagctagctcccgtgggatgccaacgcggggcaccggcctagggagatcaccgtcctccggcatgccgagatgattgccttcggagggaccccctagatcgacgtggaaacattcgcggctcgggccgtagtcctcgtcgccgaggctgcggctcgggccgtagtcctcgtcgccgaggctgcggctaccgtcggaatagtcggagaggcagtagtcacatgcggtcatgaagtcccgcatggcactggggttgccaagtccagagaaatcccaacagatgttgggctcgtagtcttcctcggacccagagggcccgacggtcgagacgtccgtcagccggtcccaaggcgaccgcatgcgaaaccccagagggtttggactcgcctcttcgagagcgcccgccaaagcggggtcgctaggcgggttgaggctgaatccaaatgacgtgggatgggaatcggtcggtaccttttggtcgacgagcggcgataaagtcacgccggggactgactgcaccatcgtctcaggtacgagggtgacgtccagcaagcttttcgcgagcgcgctggcgtcgtccgcttgctcgggattggcgtgtcgcggggagacgacactcgtcttcatctcaagcgcgaagtcgatacccggtgcgctccccgttggggtgccggcgctgtcgactcgctcgacagccgacgaggcgctgcctcctgcttggccttggttgccctgccttcccctctgacggcggggaagagggcgggatgagctcgaaggttgttcttccaccacgcgaggaagacgtcgtcgattccgccgccggcgggcgggcagtcggctgccattgtcgttgtcgcgcggcggtggaaggagtatcatgtcgtagctgccatcgagggacatgaactcaagactcccgaaacggagcaccgtctcgggttggagaggttgctggagactgcccatctggagcttgacgggaagctgttcgtcaacacgcagcaggcccctacctggcgcgccaactgtcggcgtttcgagaccggggggtccctgggccgacgagtgaatgtcgccgcgtgccccagcccagatgggtcgagcgcgagggcgagcgcgaaggggggagagcgaggcggtcggagaccggcgtgagagaggtgggaatcccgcggccttcgtgttcgtcccacgcccaggtcgggtgcgcttgtagtagggagttacaagcgtccacgcgggagagggagcgagcggcttcaagcgagcgcctatctcgtcctcgtccccgcgcagccaaccccctctaagagggccctggtccttccttttataggcgtaaggagaggatccaggtgtacaatggggggtgtagcagagtgctacgtgtctagcggaggagagctagcgccctaagtacacgccgttgtggcagccggagagattttggcacccagctggtgtgatgtcgtggccgtcggaggagcgatggagcctggcggagggatagctgtcggagcgattgagtccttgctgacgtcctcttgcttccgtaagggggctgagagccgccgtcgtcacagagaatgcggggcgccatcattgcctgtctggcggagcgagccagatgggacgccagtcttgttccctgcggcccgagtcagctcagggtagggtgatgatggcgcctcctgttgacgtggccggtctgcgtcctaggttgggcgatgtggaagctcctccgaagccgaggtcgagtctgtcttccgtggctgaggtcgagtccgagcccctgggtcgggcgaggcggaggccagggcggagtccgagccctggggtcgggcggagcggagttcgccgtcttctggggcttagcccaagtccgagccctgggtcgggtggagcggagttcgccgtcttccgggacttagcccgactccgagccctgggtcgggcggagcggagttcgccgtcttcctggacttagcccgagtccgagccctgggtcgggcggagcggagttcaccgtcttccgggacttagcccgtgtccgagccatgggtcgggcgaagcagagtttcctatggtgccttcggcagggcctgaccgcctgttagtctcactctgtcaagtggcaccgcagtcggagtggcgcaggcggcgctgtccttctgtcaggccggtcagtggagcgacgaagtgacggcggtcacttcggctctgccggctggggggcgcgcgtcaggataaaggtgtcaggccacctttgcattaaatgctcctgcgatttggtcggtcggtgcggcgatttggtcagggttgcttcttggtgaagacagggcctcgggcgagccggaaatatgttcgccgctggaggggggcctcgggcgagacggaaaccctccggggtcggctgcccttgtccgaggctaggctcgggcgaggcgtgatcgagtccctcgaatggactgatccctgacttaatcgcaccatcaggcctttgcagctttgtgctggttggggttaccagctgagaattaggagccttgagggtacccctaattatggtccccgacacaaatacaatttgattcatacaattttttatgaactaccatttttccgcatgtatggctttaagttcttgataaacccaatgggtagaagggtgcccgatctttcgatgagagatgatggaggtggaaaacttgttggagaacgacgttggctgcccgactaccacaaccaagatggtgttgcgccttgagcgacaggtacaccgtctcctgataactacgatttggggtggaggtcgacgttgtgctatccgactacaacaaccacaagggtgctgcgccttagcgatagttacaccggctcctgttgttgctgctcttgccgtgccaagaacagccttgaacctgcaagcaatcgagaacaagcaagaacaagataacaagcaaacacgcaccgatctgataaagttggggtctcgtttcaagtattcgggtggtctagccgacacacgcgtttacaaggaagtagcaaaggctaaacttacatcaaacaaaacccccatgttctttggtggctgctagttgcttaaatagagaaataggaagaaggaattctggtggagtcatgaagttccctcggcagtttctggacgcctcaggtgtagtctcccattaattcttgatccaccagcaagtatacgaagggagctttccaacaagtatttatttgcattaaacggccttggaagttggaagatatgccccatttaaacttgtacttggtgctgttacgaaatcctctcgggtgcagcagcctttattgccttgttgccttctccagtccaagatggttcacctcccaaacacctgagcataataaagtcatcgcaaggctttagtacctcatttaaagaagaattagcttcaatagcaaggaacgagttcacgtgataattaagtttacgtgcacgggctcgtgtcattggtccttgattagctacgaatggtgaagtggtcactggtatggttgtatcaatgatggtgatgtcctcatcagttcttatcaattttcttttccacacgcttgattctctctggaccgttaaagacgaacatctcttcatacttattgtattcctcatcttcgtctcccacattctcaactccaacaattttttgctttccagaaataactacatgcatcttctcatctgctggatcgagtacatagaacacttgtgcaacacattcggcgagaacccacaggtcatctttatatcctactttctttaagtctaccagtgtgagtccgtagttatccactatcacccccacgggatgttgtacccattggcacttaaataagggtattttcatgcttgggccataatcaagttcccatatttcctctatgaatccaaaatatgtggtcttctgtccatgtaggtcaaaagcatcgatacgaacatcgctattttgtgcaacacttttcatgtcttttgatttagtgtagaatgtgtacccattgatgtcatatgcttgccatgatgtcacaaaacacgatggcccagaagccaaattcttcattgttttctcttccaaagagtctccgaatgggatgtttttgtccattaagcattcgctgaaacgatgtttgtgctccctcatgatccagtcccctgtgcggttctgattttctttacgaagctcatccaggtgttcctctatgtaaggctcggctatcatgagatgttgtatagcctctacacaggcggttccaggaaccgcttgtggtgcaccgcctgtacagaggtttactgtagtagtgaaacgagctttcaaatgggagagggcagtcttggactggccacctatgaaggcacaaagccttaaaaattctaaattcaatgatgttacacccggttttaataacaaacatgggcgcggatcaaatgtgtgttaagatcaaatctcacacatacgatgactcatggtatagaaatgaatgtcacgtttttattatatagtaggggttctatacaaaatatctaaataattacattatatgaagacaacgatccacctcaaccatagttgattgagaggcgacgacctagacctctcacgaactcatcgctgtatcattcatgctccttttcttgcggtacctattcctgacctggggggttgtgagtatagcaagagtgagctcacatacattcattgcattaataagttgtgggaaataatgtgcatgagatcacttatggtggggcccttgtgaagtgtaaggcttatcaacgaataagggttcaggctcagtattgcttttaataaattggtcaaaattttattagcatttactaagtataactagataccatcccattaagagaccacaattaataataaatcccataatgcaagtcaaacgacagattaaatttagtttcataaattaatcatgcaagagtcttgagtcattcttgactgtgagcacgacttatatactagttttacaccctgtagaggttgtgcatatttacccacaataagtgtttcccatttagcgatataggaatccctcgtccaaaaagctttacagacagtccgacctgaggacctccctatacctgcactcctccaccccggttgccccttttgggaaaggattaactcacactagctttcctaattagtcagccaagggtgttccattccacccttgtggtagcactgttatttcaagttaagctccatgttacaattaacacaatagtcttatcatgaaccataattaaaccaacaacaatagtggaacatgatcatagttcagtataacattaatcccaaaactaggtagagcaataacaagtctacccaattgttcatttgtttgcaaggtgtggggtaaacaaaactagggtaacctattgggtcccaacaaattaaactgagcatgtcatagtgattaacaggaacattattaggtaaagaagagtgattaagatcataacttgcctgtgacttgagattccaagtacttcaccaagttggtcttcgggtttctcgtgacctcgctgctatgcatagcaatacatacagtcaagcaaataatgggtatggtaacattacaccaaagcataagaacaaacagtgtaagaatattctacgcgctgctacgagatcataggttcgagaaccacaaaaaatcagagttacgattaaaaaagatatgatttcctaaagttttaggtgattaaatatattctatataaatcatgtgagaaaagatatatctaactcaacttttaatctaagttacaattaaattatattccagacaaattatagatgatccaaattaaaataatatactaactctagttaaattagttaatacaatagacataggttaaacaaattagttatttattttgagaacatgttacatgataaaataatgttacaaaagcatagggaatattattaagaagctaatgcaactggaacagactaaatcagattaaaatggtcaagttatgatttatctaagatttttagatttatttttatatcaaaaatcattttctagattttattttatgtaaataagttaaattttggacgacagataccaattccaagaaagtcagggtttattttataaaagtaaggacccgttggcattgatttttaaatggggctagattgtgggttgattcatataatctagaggggctctttggaaagattccctggccaaaggggtacgagccaactagagttgccctatccacatccaacggccccgattagaacctactttaaatgaaccggaatacaaccgggatcgtgggatccctgatgaaggcacctgattaaaaggtgaatcagacctattcataattgtttgatctctgatccgcagtccgtaatccgatgatggcgcgatctgatctaactcatccgatagccgatcaacggctcatatcaatgaatcgaagaggtatgtttcttttaatcaagagcgttcatcagaatccgatggtcatcactcacctcctcagccttgacgagagccagggcccgccggcctgaaaccattgcgtcgcgtttttttccacgggggcgccatggctgacaacaagcccgagcggctccccgtggacaaaactcggaatgaactagtgacaccgaggggcacaacaacctacatagattgtttcttacctctgttgtcagcgcagacgctcctgcccacggttgcgagcgacacgcaganggaggattgctctgatgagcaattgtcgtttcctccgaccgtggtcgtcgcctgtgaagcacccaacatgcgtgacgaaaacctgggacacccaagtaccacccatcgaggttagggggtcacacacagggcggatcgacggcggcagcggtgctctctcatgacggtgcttacgcacggctccggtgatcccagctccacaacatggccacaatttttctctcatcaataggattgagtagaggggggatcatggccagttctatttatgagatgcagtggactaggattggattggggaaggatccaagcgggatccatggcggcgcccacaacattctggtagaggggataagcctgacatgatgggcacactggcagcaaaaccgagcgctcgacgttgaagacttgcgcacgacgtctggggctaagcggcaggccccgcatggctgacaggtggggtaggcctgtcggcgctgatctgttcatgtgccggtgcggaggtgcaggcttatcgagccaacgaggcagattcaaccttgagaggctgatatgtcttcttttttttcttatttttttctaaaatcctgattcctttcaatgtcagttttgaattccaaattcaaatttaatttgattctcaagcttcaattttaatgcaacatccaaagacccaacatgaaatgcataattccattttatttatcttattttatctattaaacaaagagtttcttaatatgaaacttatatacacaaaagacactattctaagaaaacaattcctcatatatcatcttaaatcttttgctgaatattctttaaacattaattctaaatagttttatttgtacaagaatttgtgattatttcctacgaagagatggttcctaggcactataatgaatagttttgctaattaaacaattgaaaatgtttctatgttctctgttttaaccttagtttagagtttttaacttcaagtttgaactaccaaagtttgaacctctttttttattttctttatacttttaaaatacatttaaactcaaatcttttggagaacctttataaatcccaaaatagggttttgaggtgttataaacgaggagtctgtgcatgggacggcaagtcacggtaagaccagtccaaccgaatgatggggcagctcggtgtcgtctcaattaatgcatctcttaagttgctgaccaccaaccatgttggaacctgatcagttggtacccattgtctgtttacatgtggtagcttctaattggttcgcgtgatcttgaattttaaaaaattgaaataacatttttataaaattagaatctagcttgtggtaacattgctcactccattgttgaatatatcaaaatggagaaagcacgacgttaaaatgcttgcaacatttatgtaggagtgttattttatgtttttgcgaggagtataatcgtagtgtcactgttgacaatctttggcgacttttagctaaaggagaggagagacaatttcttgctaatgataggaattatagattgcatatattgaaagtgatagagctagagtgcccgatctttcggtgagtggagataattccgatttggtggaagtagaccctcacgatccgactacgacgagcgaacccgaagcgccaatgcaatcgctgaaccaactcccaatggttaccgaccttgcttatgcgagatcggcctgatcacgaagatcgtttcctgtgcgcaatcgaagaacgaacaagaaaaagatgcgagcaatcttaatatcactcgaggtggagttctgaatcacagaggacaacacgtatttgtgtgtgttctggggtagctaaagctagatgtaaaacaaaactcaagttctaaatgaaacaggactctgactaaatagaggagaggcgtgaacagtaggtcgacgctacagtaccacgtttactgttcacgacttacctaggcgccccatccgggccttcctattggaccatcttctaatcttctgggccttcgttctttaacaacatgatgtagttcaattctcttgcacgagcctgagtcactggcccaagtggaagggtggcgcctggactagggaagatggtgcctgggctggagaaggtgctgctggtgtagatgtactcatgttggtgttgatgtcctcctcatcctccccttcttgaactgaagtcgtcctcgacggcaactcctcatcttctcccgcatacggtttcaaatctgcaacattaaaattagtggaaacaccaaacttcgcaggtaggtcaaggatataagcattagcattaatcttggttagtatcttaaaaggaccagcaacacgaggcatcaatttagaacggcgcaaagtaggaaaacgatcctttctcaaatgcaaccaaaccatatcaccaggttcaaaagtaactagtttctggcctttactaccaataatctgatatttagcattagcagcaacaatgttttgttgagtttgttcatggaggttaatcatttgttcaacatgtgcaacatcatctatgtgtggggcgtccgcagcatcaagcgaaaacaaagcaataggcgccctaggaatgtaaccataaacaatttgaaaagggcacatctttgtagaagaatgtgttgcatgattataagcaaactcaacatgaggcaagcaatcctcccaacatttcaaatttttgtctaaaatagccctaagcatggtagacaaagttcgattaactacctcagtttgaccatcagtctgagggtgacaagtggtgctaaacagcaatttagttcccaatttattccacagagatctccaaaaatgactgagaaacttagcatcacgatctgagactattgtattgggaatactgatgtagctgaggtgcccgatctttcggcgagtagagataattctgatttggcggaagatgacccttgcgatccgactacgatgagcaagcccgaggcgccaatgcaatcgctgaaccaactccctgtggttaccgaccttgctgatgcgagatcggcctgatcacaaagatcgtttcctgtgcgcaatcgaagaacgaacaagaaaaagatgcgagcaatctaatctattactcgagggtggagttctgaatacacgaagacagcgcagatttgcgcgtgttcgagagtagctaaggctaacgtaaaacaaaactcaagaaataaaggaggcgcagctcctggataaatagagaggtggcgcagcccctaggggcggccaaccctaggtcatccattatgggccgcagttgggctggtcgtctattcttcc

SEQ ID NO: 651 - DNA, 17981 bp, Zea mays
  source (0)...(0): Zea mays BAC clone full insert sequence contig bacm.pk108.h15-2.fis48
  misc_feature (1)...(17981): n = A,T,C or G
tttcccgattcgattctccaaaatggctcattttataccttgtcataagactgatgatgctagcaatgttgctgaattgttttttagagagatattcgtttgcacggtattcccaatacaatagtctcggatcgtgatgctaagtttctgagtcatttttggagatctctgtggaataaattgggaactaaattgctgtttagcaccacttgtcaccctcagactgatggtcaaactgaggtagttaatcgaactttgtctaccatgcttagggttgttttagacaaaaatttgaaacgttgggaggattgcttgcctcatgttgagtttgcttataatcatgcaacacattcttctacaaagatgtgcccttttcaaattgtttatggttacattcctagggcgcctattgctttgttttcgcttgatgctgcggacgccccacacatagatgctcttgcacatgttgaacaaatgattaatctccatgaacaaactcaacaaaacattgctgttgctaatgctaaatatcagattactggtagtaaaggccggaaactagttacttttgaacctggtgatatggtttggttgcatttgagaaaggatcgttttcctactttgcgccgttctaaattgatgcctcgtgctgctggtccttttaagatactaaccaagattaatgataatgcttatatccttgacctacctgcggagtttggtgtttccactagttttaatgttgcagatttgaaaccgtatgcgggagaagatgaggagttgccgtcgaggacgacttcagttcaagaaggggaggatgatgaggacatcaacaccaacacgagcacatctacaccagcagcaccttctccagcccaggcaccatctaccccagtccaggcgccaccccttccacctgggccagtgactcgggcccgtgcaagagaattgaactacatcatgctgttaaagaacgaaggcccggaagaatagacgaccagcccaactgcggcccataatggacgacctagggttggccgcccctaggggctgctccccctctctatttatccaggagctgcgcctcctttatttttcgagttttgttttagatctagctttagctaccctagaacacgcacaaatacgtgctgtcctctgtgattcagaactccacctcgagtgatattaagattgctcgcatctttttcttgttcgttcttcgattgcgcacaggaaacgatcttcgtgatcaggccaatctcgtagcagcaaggtcggtaaccattaggagttggttcagcgattgcattggcgcttcgggatcgctcgtcgtagtcggatcgtgagggtctacttccaccaaatcggaattatctccactcaccgaaagatcgggcactccagctctatcagaacttgcccaatccaatactttaggtccaaaacacatgtttggggtggtttcgcacaatttcgttgccgcacgtcacccattctgaaaatgggtgtcggggtgcttacaagcacgagtttttgccacagaaaccatttcttcgtttttcgcaacgaacatgcccaatccactactttaggtccaaaacacatgtttggagtggtttcgcgcaattttattgccgcacgtcacccattctgaaaacgggtgtcggggtgcatacaaagcacgagtttttgccaatggaaccatttcttcgtttttcgcaacaagcatgcccaatccactactttaggtccaaaactcatgtttggggtggtttcacgcaatttcgttgccgcacgtcacacattccaaaaatgggtgtcggggtgcaaacaaagcacaagtttttgccactggaactatttcttcgtttttcacaacgaacatgcccaatccactactttaggtccaaaacacatgtttggggtggtttcgcgcaatttcgttgccgcacgtcacccattccgaagacgggtgtcggggtgcatacaagcacgagtttttgccaccggaaccatttcttcgtttttcgcaacgaacatgcccaatccactactttaggtccaaaacacatgtttatggtggtttcgcgcaatttcattgcctcacgtcacccattccgaaaacaggcgtcggagtgcatacaaacacgagtttttgccaccggaaccatttcttcgtttttcgcaatgaacatgcccaatccacttctttagctccaaaactcatgtttggggtggtttcgctcaatttcgttgccacacgtcacccattccgaaaacaggtgtcggggtgcatacaagcacgagtttttgccaccggaaccatttacttcgtttttcgcaacgaacattgatgtagcttaggtgcccgatctttcggcgagtagagatattttccgattttggcggaagatgacccttgcgatccgactacgacgagcaagcccgaggcgccaatgcaatcgctgaaccaactccctgtggttaccgaccttgctgatgcgagatcggcctgatcacgaagatcgtttcctgtgcgcaatcgaagaacgaacaagaaaaagatgcgagcaatctaatctattactcgagggtggagttctgaatacacgaagacagcgcagatttgcgcgtgttcgagagtagctaaggctaacgtaaaacaaaactcaaggaataaaggaggcgcagctcctggataaatagagagggggcgcagcccctaggggcggccaaccctaggtcgtccattatgggccgcagttgggctggtcgtctattcttccgggccttcgttctttaacagcataatgtagttcaattctcttgcacgggcccaagtcactggcccaggtggaaggggtggcgcctggactggggaagatggtgcctgggctggagaaggtgctgctggtgtagatgtgctcgtgttggtgttgatgtcctcatcatcctccccttcttgaactgaagtcgtcctcgacggcaactcctcgtcttctcccgcatacggtttcaaatctgcaacattaaaactagtggaaacaccaaactccgcaggcaggtcgagggtataagcattatcattaatcttggttagtatcttaaaaggaccagcagcacgaggcatcaatttagaacgacgcaaagtaggaaaacgatcctttctcaaatgcaaccaaaccatatcaccaggttcaaaagtaactagtttccggcctttactaccagtaatctgatatttagcattagcagcagcaatgttttgttgagtttgttcatggagattaatcatttgttcaacatgtgcaagagcatctatgtgtggggcgtccgcagcatcaagcgaaaacaaagcaataggcgccctaggaatgtaacataaacaatttgaaaagggcacatctttgtagaagaatgggttgcatgattataagcaaactcaacatgaggcaagcaatcctcccaacgtttcaaatttttgtctaaaacagccctaagcatggtagacaaagttcgattaactacctcagtttgaccatcagtctgagggtgacaagtggtgctaaacagcaatttagttcccaatttattccacagagatctccaaaaatgactcagaaacttagcatcacgatccgagactattgtattgggaataccgtgcaaacgaataatctctctaaaaaacaattcagcaacattgctagcatcatcagtcttatgacaaggtatgaaatgagccattttggagaatcgatcaacaaccacaaaaatgctatccctccccttcttagttctaggcaatcccaaaacaaaatccatcgaaatatcaatccaaggggaagtaggaacaggcaaaggcatatacaaaccatggttgttcaaccgtgacttagctttctgacaagtagtgcagcgtgcaacaaggcgctcaacatcagcgcgcattcgaggccaaaagaagtgggcagccaacacctcatgtgtcttgtagacgccaaagtgccccatgagaccgcctccatgtgcttcctgtaacaacaaaagacgaaccgagctagctggaacacacagcttgttagcgcgaaacaggaacccatcctgtatgtaaaatttgccccatggtttcccattaatacaatggccgaaagcatctttaaaatcagcatcatcaacatattgatctttcacagtgtgcaaaccaaagattttaaaatctaactgtgacaacatggtatagcgacgagacaaagcatcagcaataacattgtccttcccgttcttgtgtttaataatgtaaggaaaggactcaatgaattctacccatttagcatgacgacggttcagatttgtttgggcgaatatgttttaaagcctcatgatcagaatggattataaactcacgatgccaaagatagtgctgccatgtatgcaaagtgcgcactaaagcgtaaagctccttatcataagtagaatatttcagactagcaccgcttaatttttcactaaaataagcaactggttttccttcttgtaacaaaacagcacctagcccaataccgctagcatcgcattcaagctcaaacactttattaaaatcaggcaattgcaatagaggagcttgggttaacttatctttcaaagtgctgaacgcttcctcctgggaatcactccaagcaaatggcacatctttctttgtaagctcatgtagaggcgctgcaatggagctaaaatcacgaacaaatctgcggtagaaaccggcaagtccaagaaagctccgaatttgtgtgaccatcgtcggtgtaggccactcccgaatggcagcaatcttgctgctatccacctcaatgccctgtggagtaacaacataaccaagaaacgagacacgtcatgtacaaaagatgcatttttccatgttagcaaataactgggcagcacgcaatgcatcaaaaatagcacgtaaatgttccaaatgctctttcttagatttgctgtaaataagaatatcatcaaaataaacaaccacaaacaatcctatgaagggccttagaacttcattcatcactcgcataaaagtgctgggagcattagtcaatccaaacggcataaccaaccattcatataaaccaaattttgttttaaaagccgttttccattcatcacccagtttcattctaatctggtggtaaccactacgcaaatcaatcttagtgaaaataatggcaccactaagctcatctagcatatcatcaaggcgtggtataggatatcgataacgaatagtgatgttattaatagcacgacagtctacacacatatgccatgacccatctttcttgggaacaagtaacacaggaacagagcaagggctaagagactcacgaatgtatcccttgtcaagcaacgcctgtacctggcgctgaatctccttcgtctcatccggatttgtacggtacggtgcgcggttcggcagctgtgcgccgggaatgaggtcgatctggtgctcaatgccacgaagtggtgggagacccggtggtaagtctttgggaaagacatcagcgtactcctgcaaaaggttagcaaccatagggggaatagccaaagatggtgcatcatcaagtgaaatgaggacactagagcatataagtgcatagcatggcaaatgagcaccgtgtagatcatcaaaatcagcacgtgtagcaagtaaaacaggagccttcaacttgatttcagaaggagcagatggcgatggatcaagttgtttagcagttatagcagctcgggcaagatcatctttaacaatttgttcaggtgtcattggatgtataattattttctgacccttaaaaatgaaagaataatgattcgaacgaccatgatgcaagctatcagtatcatattgccaaggtcgaccaagtaacaaagagcatgcttccatgggaataacatcacaatcaacaaaatcagaataagcacccatggagaaaggaacacgcacagaacgtgtaatttttattttaccaccatcattaagccattgaatgtgatatgggtttggatgcttacgagtgggtaacgataacttttcgaccagcatggtactcgccaaattgttgcaactgccactgtcgataatgatgcgaattgaccgctcctgcacaacaccctttgtatggaacagagtgtgtcgctgattcttctcgggcaaagcgacctgtgtactgagaacacgctgcacaacaagactttcatacctatcagcgtcgctcgggttgacatgtacctccgccttagctgcatggtcagtggcaagtagtgcatgttcaatttcttcagaatcactagcggaagagtactcaccatcgtcacgaatgagcaaagtgcgcttgtttgggcagtcccgaatcacatggccaaatcctctacaacgatgacactgaatatcccgtgtacgacctgtgggtggggcagtgctggctggattggtcgtcttctcgcgtggagtagtggtggacgtggatggcgcagggggaactggtgctgaggtggatgtcgagcttcgtcctgcaaaagggttagaatatggcttcgagcggcgtccctgcacttcacgttcagctttacaagcatattcaaataaagtagtcatatcataatattccttataatcaagtatatcttggatttcgcggtttaaaccaccacgaaaacgtgccatagcagcgtcgttgtcctctaatatcccacaacgaatcatacctttttgtaactcctggaaatagtcctcaacagattgagaaccttgctgaaaacgctgcattttattaagcaaatcacgagcataatacgaaggcacaaatcgatgtcgcatcgcagctttcaactgatcccaagtggttggaatggtagtgggatgttttattttaaactcacgccaccaaattaaagcaaaatcagtaaattcactaatagcagctttaacctgagaatgtgcagcaatatcatggcatgaaaatttttgttcaacctctaactcccaatcaagatatgcagcaggatcatatttgccattaaaaggtggaattttaaatttaatcttagaaaataagtcattagggggatgacgaaccacacggcgtgcacgaccacggcgatctccatcttcccactcagtgtcaccgccgtagtcctgctccatctttgtggtcaacgcatcaaggcgtgccaggatggtgtcgagtgtggtgcgagtcgctgtttgagcaaggtcaagctggttgaaacgctcggtcgtcgaagtgaccgttgaatcaagccgttcatgcattgtcataatgtcatcagcaagtccatcaacttgtccccttacttccagcaactgggcatttaccgtgtcgtgtgctcctgccatagttagcgcaaacaccaaaacaccaaaagaagaagaaaaaaacaacgacaaaaacaggggtgtactgctcacaaggcgctcacactagtgctgttatcaagttcttattcattcttaccaagccacagtggtgaactgcaaccaacaggtggaaacggtgaaagattggatgagtgattgcctggagaaacagaagcctgctcgtcgtagaaatatgtggagttctgggtaggctgcactcaagtcaatgattagcacaatcaaacaataatgcaaagttgaattatagtgcagaacacgaaactatattgctggccacaagtgcaaaggacggatggaactagcagaatggcagtaccgtaaatattgtactagcgaggccactagtaggaatcacaagtgattttgtttttcttttttgtatgatttttttgatatttttctcagcacaagaagcaacaaaataggagctagacgaagtttcaccgaaaacagagatcagatgtggtctacagaaaatcaggaagttctctgaaaagcgtgcgagaactttgacggatttttttctttattttcctgaatttttttgacaatttcgtcgaaaccaaacagaccgaaaggtcagtttggccggcctcagaatggtgtcaactagctcctgtaaaaatttcagattttttggacacccaagcgaaaagttatgcccggtttaaggaaggtacctcaaattatgttttcaaacgaccgggatgaaacaaccgtatcctttctccttcgttgttttttgtttctgttttattttttgacgtaaccgaaggagaaaaacaaggaaacgatgttgactcggtttgtttttttttctgttttttttcgtaaccgaaggagaaaaacaaggaaacggccgttgactcggtttgtttttttctgtttttttttacgtaaccgaaggagaaaaacaaggaaacgatgttgacttagtttgtggcgtgatcaaaggggagatggtggcggcgctagggtttgaatggtggaagaacacaatgcaaccagcaacaaatgacgcgaaagcacacaaattcaacaatgcagattattgaaagaaagtgcgaggctcaaaaggtgctgggataagatctaacctgaatttttatgtggttttgtggactgtaggaaaaaaacgctcgataaactcaccgatcaacctggaaatctgtcggggaccataattaggggtaccctcaagacgcctaattctcagctggtaacccccatcagcataaagctgcaaaggcntgatgggtacgattaagtcagggatcagtccacacgagtgacttgatcacgcttcgctcgtgcctagcctcggccaagggcagccgacctcgagagacttccgtctcgcccgaggcccccctttttaacggcggacgcacctccggctcgcccgaggccttggcttcgcctagaagcaaccctgactaaatcgccgcgccgactgaccaggttgcaggagcatttaacgcaaaggtggcctgacacctttatcctgacacgcgccccccagcagagccgaagtgaccgccgtcactccaccgctccactgaccagtctgacagaagaacagcgccgcctgtgccacaccgactacagtgccactcgacagagtgagtctgacaggcagtcaggccctgccgaaggcgccatgggaaactccgctccgcctgaccccagggctcggactcgggctaagacccggaagacggcgaactccgctccgcccgaccccagggctcggactcgggctaagacccggaagacgacgaactccgctccgcccgaccccagggctcggactcgggctaagacccggaagatggcgaactccgctccgcccgaccccagggctcggactcgggctaagacccggaagacggcgaactccgctccgcccgaccccagggctcggactcgggctaagacccggaagacgacgaaactccgcctcgcccgaccccagggctcggactcgggctaagacccggaagacgacgaaactccgcctcgcccgaccccagggctcggactccgccctggcctcggccaaacgatctccgcctcgcccgaccccagggctcgggctcggcctcggcaacggaagacagactcgacctcggcttcggaggagcccccacgtcgccctgcctagggcacaggcccgccacgtcaacaggaagcgccatcatcgtcctaccccgaatcgactcgggtcacggagaacaagaccggcgtcccatccggccagctccgccggatgggcaatgatggcgctccacgagctctgtgacgacggcggccctcagctctcttacggaagcagggcgacgtcaacaaggacccgaccgctccaacagctgtccctccgccaggctccgtcgctcctccgacagccacgacatcacgccagcaaggtgccaagacctctccggctgccacattggcatgtacctagggcgctagctctctctccgctagacacgtagcactctgctacaccccccattgtacacctggatcctctccttacgattataaaagggaggaccagggccttcttagaggaggttggtcgcgcgggaccgaggacgagacaggcgctctcttggggccgctcgcttccctcacccgcgtggacgcttgtaacccccctactgcaagcgcacccgacctgggcgcgggacgaacacgaaggccgcgggacctccacctctctcacgcccgtctccggccacctcgcctctccccccttcgcgctcgcccacgcgctcgacccatctgggctggggcacgcagcacactcactcgtcggcttagggacccccctgtctcgaaacgccgacagttggcgcgctaggtaggggcctgctgcgtgctgacgaacagcttcccgtcaagctccagatgggcagtctccagcaacctctccggcccgggacggtgcttcgtttcgggactcttgagttcatgtccttcgacggcagctacgacatgatactccttcctccgccgcgcgacaacgacaatggcggccgacaacccgcccgccggcggcggaatcggcgacatcttccccgcgtggtggaagaacaacatccgagctcgctccgtcccctcccccgccaacggaggaggaggcgaggcaaccaaggccaagcgggaggccgcgcttcgtcgactgtcgagcgaatcgacgtccccagcgccccgatggaaggcacgccgggcgtcgacctcgcattcgagacggaggcaggcgtcgtccccccacgacacgctgatctcaagcaagaagacgacgcccaacgcgctcgtggaaagcctgcaggacgtcgccctcgtacctgagacgacggtgcaaccagtccccgatgtgactacgtcgctcctcgtcgaccaaaaggtaccgactaactcctatcttacgtcatttcgactcggcctcaacccgccaaacgacctcgctttggcgggcgctctcatcgaggcgagtgcaaccccactggggtttcgtatgcggtcgccttgggaccggttgacggacgtctcaacctacgggccctctgggtccgaggaagatgacgatcccagcatctgttgggatttctccggacttggcaaccccagtgccatgcgggacttcatgaccgcatgtgactattgcctctccgactgttccgacggaagccgcagccttggcgacgagagctgcggcccaagacgcgaatgtttccacatcgagctaggggatccctccgaaggcaaccatctcggcatgccggaggacggtgatcttcctaggccggtgcctcgcgccgacatcccacgggagctagctgtggtccccgctccggcggggggttacgacccacaactcgagcaagtccgcgaggcgcaggccaggctcaatgagggaacaggagcgcttgagccgatccgtcgggacgtcgggcaggtatgggcgggccaacccccggccggagaaatacgtcacctgccccaaggtctccagcaccgcgtcgccaacgatgtcagggtcaggccgccgcccgcatctagcggggttggccagaacctggcagccgcagcgatgctcctccgcgcgatgccggagccatcaaccaccgagggtcggcgaatccagggagagctcaagaatctcctggaaggcgctgcggcccgacaggccgagagcactgcctcccgaaggcaggggtacccctcggaacctcatgacgcgacttcccgattcatgcgggaagcctcggtctacaccgggcgcacgcgtaacaccgcgcctgcggccccgggccacctcggcaacgagcaccatcgacgcgaccgtcgggcccacctcgacgaaagggtgcgccgaggctaccaccccaggcgtggggggcgctacgacagcggggaggatcggagtccctcgcccgaaccacccggtccgcaggccttcagtcgggccatccgacgggcgtcgttcccgacccggttccgacccccgactactatcacgaagtactcgggggaaacgagaccggaactgtggctcgcggactaccgccttgcctgccaactgggtgggacggacgacgacaacctcatcatccgtaacctccccctgttcctctccgacactgctcgcgcctggttggagcacctgcctccggggcagatctccaactgggacgacttggtccaagccttcgccggcaatttccagggcacatacgtgcgcccgggaaattcctgggaccttcgaagctgccggcaacagccgggagagtctctccgggactacatccggcgattctcgaagcagcgcaccgagctgcccaacatcaccaactcggatgtcatcggcgcgttcctcgctggcaccacttgccgcgacctggtgagcaagctgggtcgcaagacccccaccagggcgagcgagctgatggacatcgccaccaagttcgcctctggccaggaggcggtcgaggctatcttccgaaaggacaagcagccccagggccacccatcggaagaggctcccgaggcgtctgctccgcgcggcgccaagaagaaaggcaagaagaagtcgcaatcgaaacgcgacgccgctgacgcggaccttgtcgccgccgccgagcacaagaaccctcggaagccccccggaggtgcaaacctcttcgacaagatgctcaaggagccgtgcccctaccatcaggggcccgttaagcacaccctcgaggagtgcgttatgcttcggcgtcacttccacagggccgggccacccgccgagggtggcagggcccgcgacgacgacaagaccgaagatcaccaagcaggagaattccccgaggtccgcgactgcttcatgatctacggagggcatgcggcgaatgcctcggctcggcatcgcaagcaagagcgccgggaggtctgctcggtgaaggtggcggcgccagtctaccttgactggtccgacaagcccatcaccttcgaccaggccgaccaccccgaccatgtgccgagcctggggaaatacccgctcatcgtcgaccccgtcgtcggcaacgtcaggctcaccaaggtcctggtggatgggggcagctgcctcaacatcatctacgccgagaccctcaagctcctgcgcgtcgatctgtcctccgtccgagcaggcgctgcgcccttccacgggatcatccctgggaagtgcgtccagcccctcggacgactcgacctccccgtctgcttcgggacgccctccaacttccgaagggagaccctgacgttcgaggtggtcgggttccgaggaacctaccacgccgtactgggggaggccatgctacgcgaagttcatggccgtccccaactacacctacctaaagctcaagatgccgggccccaacggggtcatcaccgtcggccccacgtacaaacacgcgttcgaatgcgacgtggagtgcgtggagtacgccgaggccctcgccgagtccgaggccctcatcgccgacccggaaaacctctccaaggaggtgccagacgtgaagcgccatgccggcaacttcgagccagcggagacggttaaggccgtccctcttgaccccagcggggacacctccaagcagatccggattgggtccgggctcgaccccaaataggaagcagtgctcgtcgactttctccacgcaaacgccgacgtctttgcgtggagtccctcggacatgcccggcataccgagggatgtcgccgagcactcgctggatattcgggccggagcccgacccgtcaggcagcctctgcgccgattcgacgaggagaagcgcagagtgataggcgaggagatccacaagctaatggcagcagggttcatcaaagaggtattccatcccgaatggcttgccaaccctgtgcttgtgaggaagaaaggggggaaatggcggatgtgtgtagactacactggtctcaacaaagcatgtccgaaggttccctaccctctgcctcgcatcgatcaaatcgtggattccaccgctgggtgcgaaaccctgtccttcctcgatgcctactcagggtatcaccagatccggatgaaagagtccgaccagctcgcgacttctttcatcacgccattcggcatgtactgctatgtcaccatgccgttcggtttgaggaatgcgggcgcgacgtaccagcggtgcatgaaccatgtgttcggcgaacacatcggtcgcacggtcgaggcctacgtcgatgacatcttagtcaagacaaggaaggcttccgacctcctctccgaccttgaagtgacattccgatgtctcaaggcgaaaggagtcaagctcaatcctgagaagtgtgtcttcggggtgccccggggcatgctcctggggttcatcgtctctgagcgaggcatcgaagccaacccggagaagatcgcaaccatcaccagcatgggacccatcaaggacttaaaaggcgtacagagggtcatgggatgcctcgcggccctgagccgcttcatctcacgcctcggtgaaagaggtctgcctctgtaccgcctcttaaggaaggctgagtgtttcgcttggacccctgaggccgaggaagccctcgggaacctgaaggcgctccttacaaaggcgcctgtcttggtgcccccggcggatggagaagccctcttggtctacgtcgccgcgaccactcaggtggttagcgccgcgattgtggtcgagaggcaagaggaagggcatgcactgcccgttcagaggccggtctacttcgtcagcgaagtgctgtccgagaccaagatccgctacccacaagttcagaagctgctgtatgctgtgatcctgacgaggcagaagttacgacactacttcgagtctcatccggtaactgtggtgtcatccttccccctgggggaaatcatccagtgccgagaggcctcgggcaggatcgcaaagtgggcggtggaaatcatgggcgaaacgatctcgttcgcccctcggaaggccatccagtcccaggtgttggcggacttcgtggccgaatgggtcgacacccagctgccgacggctccgatccaaccggagctctggaccatgtttttagacgggtcgctgatgaagacaagagccggcgcgggcctgctcttcatctcgccccttggaaagtaccagcgctacgtgctacgcctccatttcccggcgtccaataatgtggctgagtacgaggctctggtcaacgggttgcggatcgccatcgagctaggggtcagacgcctcgacgcccgcagtgactcgcagctcgtcatcgaccaagtcatgaagaactcccactgccgcgacccgaagatggaggcctactgcaatgaggttcgacgcctggaagacaagttcttcgggctcgagctcaaccacatcgctcggcgctacaacgagactgcagacgagctggctaaaatagcctcggggcgaacgacggtccccccggacgtcttctcccgggatctgcatcaaccctccgtcaagatcgacgatgctcccgagcccggggcaccctcggcacagcccgaggcaccctcggtacagcccgaggcaccctcggcccccgagggtgaggcactgggcgtcgaggaagagcagagcggggccacgcctgatcgagattggcaggccccgtacctgcaatatctccgccgaggagagctaccccccgaccaagccgaggctcggcgggtagcacgacgcgccaagtcgttcgtcttgctgggcgacgaggaggagctctaccatcggagcccctcgggcatcctccagcgatgcgtctccatcgccgaaggtcaggaactcctgcgagaaatacactcgggggcttgcggccatcatgcagcgcctcgagcccttgtcgggaatgctttccggcaaggcttctactggccaacagcggtggctgacgccactagaattgtccgcacctgcgaagggtgccaattctatgcgaagcagacccacctgcccgctcaggctctacagacgatacccatcacctggcccttcgctgtatggggtctggacctcgtcggtcccttgcagaaggcgcccgggggctatacgcacctgctggtcgccaccgacaaattctccaagtggatcgaagtccgacccctgaacagcatcaggtccgagcaggcggtggcgttcttcaccaacatcatccatcgcttcggggtcccaaactccatcatcaccgacaacggtacccagttcaccggcaaaaaattcttggatttttgcgaggatcaccatatccgggtggactgggccgccgtggctcatcccatgtcgaatgggcaagtagagcgtgccaacggcatgattctacaagggctcaagcctcggatctacaacgacctcaacaagttcggcaagcggtggatgaaggaactcccctcggtgatctggagcctaaggacgacgccgagtcgtgccacgggtttcacgccgttcttcctggtctacggggccgaggctatcttgcccactgacctggaatacggctccccgaggacgagggcctacaccgaccaaagcaaccaagctagccgagaagactcgctggaccagctggaggaggctcgggacagggccttactacactcggcgcggtaccagcagtccctgcgacgctaccacgcccgaggggtccggtcccgagacctccagatgggcgatctggtgcttcggctgcggcaagacgcccggggaaggcacaaactcacgcccccctgggaggggccattcgtcatcgccaaagttctgaagcccggaacatacaagctggccaacaatcaaggcgagatctacggcaacgcttggaacatcaaacagctacgtcgcttctacccttaagatgtttccaagttgttcatatacctcgcacctacgcaaagtttagtcgtcaaggaagggtcgacctagcctcggcaaagcccgaccctccctcgggggctaaaaggggggagaccccctctgcgtcgaatttttcctcgaaaaaggatctctttttagcaggatttctttcgtgcttcttgactacttcggaaagcggatcctggaaacgacggagtacacgtaagcagccaaggctgaccgagccgagggactcctacgcctccgggatacggatacctcactcatcaccttctgcgataagtaactcgcgttcggataaagcgactccgtggaccgaacaagtcttcacgttcggaagctctcctgccgaagcagtccttcaagctttctcgactaagtcggggacagggcctcacggatgggtgaaagtacgcgtaagcggcaaggccgaccgagccgagggactcccacgcctctgggatacggatacctcactcgtcccttccgcgagaagcaactctcgcccacacaaacatccctgttaccggcagagagtccagatgctcgaaacaagaggaaaaagacgcagctttgcaagcacggcgagggtgtgttttctggcctcggcggccgcagaaggcacacgctacatgacgatctgatcctgcaggctcgggtcttcacgctgaagggagccgtagcaccctcggcatcgacggcgtcttcagcaaagtccgacccagcctcggatggcggcgcgatcagagactcctctgggaatccggcccgagcaggcggctcggccggttacccctggggcctcggccgaccggcttccaagggcgccagcccgacccgaggcctcggctgatcgactccggcgtcggctccgctgacggacaacccggctaggctccggccaaccaggttcccattctcgagccaactccgcctctgttcatactggtatcgctacccctggcctcggctcatcgaagagcggccgaggggtctctttaactaagctagaggagccccagacaacaaggccgatcaagccgagggattcctacgcctccagatacggatacctcactcctcac

SEQ ID NO: 652 - DNA, 1041 bp, Zea mays
  source (0)...(0): Zea mays BAC clone full insert sequence contig bacm.pk044.a19.fis1
ccccaaaactgaggttttttgggccctaaaaattggggggtttggggccatttttttttggaaaaaaaaggaagaaaaggttttcgggggcaaaaattttggggttttggtttgcggggggaccaaccgttttccaaatgggggacggggggcaaggaattttacgaaacccccttcaataagaggtttggcctaaaatagtggttgggcagtttcgtgggaaaacgaagaaatgatccggtgcaaaaacacggcttgtatgcaccgacaccgtttttgaatggggacgtcgacacgaaatgtgcgaagcacccaaacaagagttttgacctaaagtagtggatgggcatgttcgttgcaaaaacgaagaaatggttccggtggcaaaaactcgtgcttttatgcaccccgatacccgtttttggaatgggagacgtgcgacaacgaaattgcgcgaaaccacctcaaacatgagttttggacctaaagtagtggattgggcatgttcgttgcgaaaaacgaagaaatggttccggtgacaaaacctcgtgcttatgcaccccgacacccgttttcggaatgggtgacgtgcgacaacaaaattgcgtgaaaccaccccaaacatgagttttggacctaaagtagtggattggacatgtttgttgcgaaaacgaagaaatggttccgatgggcaaaactcgtgctttgtatgcacccctcgacaaccgttttcagaatgggtgacgtgcggtaacgaaattgcgcgaaacaccccaaacatgagtttttggacctaaagtaatgaattgggcatgtttagtgccaaaaacaaaaaattgttttcggtggcaaaaactcgtgctttgtatgcaccccaacacccgttttcggaaagggtggaatgggacaacaaaaatttcccgaaaaccccccccaaactggaaattttgggccccaaaatatggggatttgcgcctttttcttttcccaaaaaacaaaaaaaatgggtttccgggggggaaaaaaatcccgggctttttt

SEQ ID NO: 653 - DNA, 766 bp, Zea mays
  source (0)...(0): Zea mays BAC clone full insert sequence contig bacm.pk044.a19.fis2
  misc_feature (1)...(766): n = A,T,C or G
ttcgcaacgaacatgcccaatccactactttaggtccaaaactcatgtttggggtggtttcacgcaattttgttgtcgcacgtcacccattccgaaaacgggtgtcggggtgcataagcacgaggttttgtcaccggaaccatttcttcgtttttcgcaacgaacatgcccaatccactactttaggtccaaaactcatgtttgaggtggtttcgcgcaatttcgttgtcgcacgtctcccattccaaaaacgggtatcggggtgcataaaagcacgagtttttgccaccggaaccatttcttcgtttttgcaacgaacatgcccaatccactactttaggtccaaaactcttgtttggggtgctttcgcacaatttcgttgtcgcacgtcacccattccaaaaaccgggtgtcgggtgcatacaaagcacgtgtttttgccaccggaatcatttcttcgtttttcgcaacgaacatgcccaatccactactttaggtccaaaactcttgtttgaggtggtttcgtacaatttcgttgccgcacgtcacccattgtgaaaacggttgtcaccccgcatacaaagcacgagattttgccaccggaaccatttcttcgtttttcgcaatgaacatgcccaatccactactttaggtccaaaactcatgtttggggtggtttcccgcaatttcnttgccccacgtcacccattctgaaaacggttgtcgggtgcatacaaaacacaaatttttgcccccggaaacattt

SEQ ID NO: 654 - DNA, 1128 bp, Zea mays
  source (0)...(0): Zea mays BAC clone full insert sequence contig bacm.pk044.a19.fis3
ggtttgggcatgtcgttgcgaaaaacgaagaaatggttccggtggcaaaaactcgtgctttgtatgcaccccgacaaccgttttcagaatgggtgacgtgcggcaacgaaattgcgcgaaaccaccccaaacatgagttttggacctaaagtagttgattgggcatgttcgttgcgaaaaatgaagaaatggttccggtggcaaaaactcgtgctttgtatgcacccgacacccgtttttggaatgggcgacgtgcgacaacgaaattgcgcgaaaccaccccaaacatgagttttggacctaaagtagtggattgggcatgttcgttgcgaaaaacaaagaaatggttccggtggaaaaactcgtgctttgtatgcacccgacacccgttttcggaatgggtgacgtgcgacaacgaaattgcgagaaaccaccccaaacatgagttttggatctaagtagtggatggggcatgttcgttgcgaaaaacgaagaaatggttctggtggcaaaaactcgtgcttgtatgcacccgacacccgtttttggattgggtgacgtgcggcaacgaaattgcgcgaaaccaccccaaacatgagttttggacctaaagtagtggattgggcatgttcgttgcgaaaaacgaagaaatggttccggtggcaaaaactcgtgctttgtatgcacccgacaacccttttcagaatggttgacgtgcgtcaacgaaattgcgcgaaaccaccccaaacatgagtttcagacctaaattagtggattgggcatgttcgttgcgaaaaacgaagaaatggttttggtggcaaaaactcgtgctttgtatgcacccgacaccgtttttggattgggtgacgtgcggcaacgaaattgcgcgaaaccaccctaaacatgagttttggacctaaagtagtggattgggcatgttcgttgcgaaaaacgaagaaatggttccggtggcaaaaactcgtgcttttatgcacccgacacccgttttccggatggggtgacttgcggccaccaaattgcgtgaaaccacccccaaaaaggaatttttgaacccaaaagtaatggaattggggcacgtttcctttgcgaaaaaaccgaaaaaaatgg

SEQ ID NO: 655 - DNA, 1437 bp, Zea mays
  source (0)...(0): Zea mays BAC clone full insert sequence contig bacm.pk044.a19.fis4
  misc_feature (1)...(1437): n = A,T,C or G
cgacggtatcgttactttagttgcgcccatccactacttagatccaaaactcatgtttggggtggtttctcgcactttcgttgtcgcacgtcacccattccgaaaacgggtgtcgggatgcatacaaagcacgagtttttccaccggaaccatttctttgtttttctcaacgaacatgcccaatccactactttaggtccaaaactcatgtttggggtggtttcgcgcaatttcgttgtcgcacgtcacccattccgaaaacgggtgtcgggatgcatacaaagcacgagtttttgccaccggaaccatttttttttttttcgcaacgaaaatgcccaatccactactttaggtccaaatctcatgtttggggtggtttcgcgcaattttgttgtcgcacgtcacccattccgaaaacgggtgtctggtgcatacaaagcacgagttttttgccactggaaccatttttttttttttcgcaaaaaaaatgcccaatccactactttaggtccaaaactcatgtttggggtggtttctcgcaatttggttgccgcacgtcacccattccgaaaacgggtgtccggtccataaaagcacgagtttttgccaccagaaccatttcttcgtttttcgcaacgaacatgcccaatccactactttaggtccaaaactcatgtttggggtggtttcgcgcaatttcgttgccgcacgtcacccattccgaaaacgggtgtcgggtgcatacaaagcacgagtttttgccaccggaaccatttcttcgtttttcgcaacgaacatgcccaatccactactttgggtccaaaactcatgtttggggtggtttctcgcaatttcgttgccgcacgtcacccattccgaaaacgggtgtcgggtgcataaaagcacaagattttgccaccagaaccatttcttcgtttttcgcaacgaacatgcccaatccactactttaggtccaaaactcatgtttggggtggtttctcacaattgcgttgtcgcacgtcacccattccgaaaacgggtgtcgggtgcatacaaagcacgagtttttgccaccggaagcaattcttcgtttttcgcaacgaacatgcccaatccactactttaggtcctaaactcatgtttggggtggtttcccgcaattacgttgtcgcatgtcacccattccgaaaactggtgtcggggtgcatacaaagcacgagtttttgccaccggaaccatttcttcgtttttcgcaacaaacatgcctaatccactactttaggtccaaaactcatgtttggggtggtttcgcgcaatttcgttgtcgcacgtcacccattccgaaaacaggtgtcgggtgcataaaaccacaagttttccccccgaaaccgtttctctcattggtttagntaccgtcgactcgganacnagctcaaa

SEQ ID NO: 656 - DNA, 1620 bp, Zea mays
  source (0)...(0): Zea mays BAC clone full insert sequence contig bacm.pk044.a19.fis5
caatttcgttgtcgcacgtcacccattctgaaaagggttgtcgggtgcatacaaagcacgagtttttgccaccggaaccatttcttcgtttttcgcaaagaacatgcccaatccactacttttggtccaaaattcatgtttggggtggtttcacgcaatttcgttgccgcacgtcacccattccgaaaacgagtgtcgggtgcataaaagcacgagtttttgccaccggaaccatttcttcgttttccgcaacgaacatgcccaatccgctactttagatccaaaactcatgtttggggtggtttcgcgcaatttcattgtcgcacgtcatccattctgaaaatggttgtcgggtgcatacaaagcacgagtttttgccaccggaaccatttcttcgtttttcgcaacaaacaagcccaatccactactttaggtccaaaactcatgtttggggtggtttcgcgcaattttgttaccgcacgtcacccattccgaaaacgggtgtcgggtgcataaaagcacgagtttttgccaccggaaccatttcttcatttttcgcaacgaacatgcccaatcaactactttaggtccaaaactcatgtttggggtggtttcgcgcaatttcattgtcacacgtcacccattcagaaaacgtgtgtcgggtgcatacaaagcacgagtttttgccaccggaaccatttcttcatttttcgcaacgaacatgcccaatcaactactttaggtccaaaactcatgtttggggtggtttcaagcaatttcgttgtcgcacgtctcccattccaaaaacgggtatcggggtgcataaaagcacgagtttttgccaccggaaccatttcttcgtttttgcaacgaacatgcccaatccactactttaggtccaaaactcttgtttggggtgctttcgcacaatttcgttgtcgcacgtcacccattccaaaaaccgggtgtcgggtgcatacaaagcacgtgtttttgccaccggaatcatttcttcgtttttcgcaacgaacatgcccaatccactactttaggtccaaaactcttgtttgaggtggtttcgtacaatttcgttgccgcacgtcacccattgtgaaaacggttgtcaccccgcatacaaagcacgagattttgccaccggaaccatttcttcgtttttcgcaatgaacatgcccaatccactactttaggtccaaaactcatgtttggggtggtttcgcgcaatttcgttgtcgcacgtcacccattctgaacacggttgtcgggtgcatacaaagcacgagtttttgccaccggaaccatttcttcgtttttcgcaacgaacatgcccaatcagtaggtccaaaactcatgtttggggtggtttcgcgcaatttcgttgccgcacgtcacccattccgaaaacgggtgtcgggtgcataaaaacatgagtttttccaccggaaccatttctttgtttttcgcaactaacatgcccaatccactactttaggtccaaaactcgtgtttggggtggtttcgcgcaatttcgttaccgcacgtcacccattctgaaaacggttgtcgaggggtgcatacaaagcacgagtttttgtcatcgga

SEQ ID NO: 657 - DNA, 2490 bp, Zea mays
  source (0)...(0): Zea mays BAC clone full insert sequence contig bacm.pk044.a19.fis6
cagggttttggacctaaggagggggattgggcattttcgttgggaaaaaacgaagaaacggtttcggggggaaaacttgtggttttatgcacccgacacccgttttcggaatgggtgacgtgcgacaacgaaattgcgcgaaaccaccccaaacatgagttttggacctaaagtagtggattaggcatgtttgttgcgaaaaacgaagaaatggttccggtggcaaaaactcgtgctttgtatgcaccccgacaccagttttcggaatgggtgacatgcgacaacgtaattgcgagaaaccaccccaaacatgagttttggacctaaagtagtggattgggcatgttcgttgcgaaaaacgaagaaatggttctggtggcaaaaactcgtgcttttatgcacccgacacccattttcggaatgggtgacatgcgacaacgtaattgcgagaaaccaccccaaccatgagttttggacctaaagtagtggattggacatgttcgtttgcgaaaaacgaagaaatggttccggtggcaaaaactcgtgctttgtttgcacccgacaaccgttttcggaatgggtgacatgctacaacaaaattgtgagaaaccatcccaaacatgagttttggacctaaagtagtggattgggcatgttcgttgcgaaaaacgaagaaatggttccggtggcaaaaactcgtgctttgtatgcacccgacacccattttcggaatgggtgacgtgcgacaacgaaattgcgcgaaaccaacccaaacatgagttttggacctaaagtagtggattgggcatgttcgttgtgaaaaacaaagaaatggttccggtggcaaaaactcgtgctttgtatgcacccgacaaccgttttcagaatgggtgacgtgcgacaacgaaattgcgggaaaccaccccaaacatgagtttaggacctaaagtagtggattgggcatgttcgttgcgaaaaacgaagaaatggttccggtggcaaaaactcgtgctttgtatgcacccgacacccgttttcggaatgggtgacgtgcgacaacaaatttgcgagaaaccaccccaaatatgatttttggacctaaagtagtgaattgggcatgctcgttgcaaaaaacaaaaaaatggttccggtggcaaaaaccttgtgtttttacgccccccacaccctttttcgaaatgggtgacgtgggacaacgaaattgcgggaaaccaccccaaacctgggttttggacctaaagtagttgattgggcattttcgttgcgaaaaaagaagaaatggttccggtggcaaaaactcgtgctttgtatgcacccgacacccgttttcggaatgggtgacgtgcgacaacgaaattgcgcgaaaccaccccaaacatgagttttggacctaaagtagtggattgggcatgttcgttgtgaaaaacaaagaaatggttccggtggaaaaactcgtgctttgtatgcacccgacacccgttttcggaatgggtgacgtgcgacaatgaaattgcgagaaaccaccccaaacatgagttttggatctaagtagtggatggggcatgttcattgcaaaaaacaaagaaatggttccggtggcaaaaactcgtgctttgtatgcacccgacacccgttttcggaatgggtgacgtgcgacaacgaaattgcgcgaaaccaccccaaacatgagtttaggacctaaagtagtggaatgggcatgttcgttgcgaaaaacgaagaaatggttccggtggcaaaaactcgtgctttgtatgcacccgacacccgtttttggaatgggtgacgtgcggcaacgaaattgcgcgaaaccaccccaaacatgagttttggacctaaagtagtggattgggcatgttcgttgcgaaaaacgaagaaatggttccggtggcaaaaattcgtgctttgtatgcaccggacacccgttttcagaataggtgacgtgcgaacaacgaaattgcgagaaaccaaccaaaacatgagttttggacctaaagtagtggattgggcacgttcgttgcgaaaaacgaagaaatggttccggtggcaaaaactcgtgctttgtatgcacccgacaatcgttttcaaaatggatgacgtgcggcaacgaaattgcgtgaaaccaccccaaacatgagttttggacctaaagtagtggattgggcatgttcgttgcgaaaaacgaagaaatggttccggtggcaaaaactcgtgctttgtatgcacccgacaatcgttttcagaatgggtgacgtgcgacaacgaaattgcgcgaaaccaccccaaacatgagtttaggacctaaagtagtggattgggcatgttcgttgcgaaaaacgaagaaatggttccggtgccaaaaactcgtgctttgtatgcacccgacacccgtttttggaatgagtgacgtgcggcaacgaaattgcgcgaaaccaccccaaacatgagttttgg

SEQ ID NO: 658 - DNA, 3234 bp, Zea mays
  source (0)...(0): Zea mays BAC clone full insert sequence contig bacm.pk044.a19.fis7
ccacaggaaccatttcttcgtttttcgcaacgaacatgcccaatccactactttacgtccaaatctcatgtttggggtggtttcgcgcaatttcgttgtcgcacgtcacccattccgaaacgggtgtcgggtgcatacaaagcatgagtttttgccaccagaaccatttcttcgtttttcgcaacgaacatgcccaatccactactttaggtccaaaactcctgtttgaggtggtttcgcacaatttcgttgccgcacgtcacccattgtgaaaacggttgtcaccccgcatacaaagcacgagattttgccaccggaaccatttcttcgtttttcgcaacgaacatgcccaatccactactttaggtccaaatctcatgtttggggtggtttcgcgcaatttcgttgtcgcacgtcacccattctgaaaacggttgtcgggagcatacaaagcacgagtttttgccaccggaaccatttcttcgtttttcgcaacgaacatgcccaatccactacattaggtccaaaactcatgtttggggtggtttcacgcaatttcgttgccgcacgtcacccattccgaaaacgggtgtcgggtgcatacaaagcacgagtttttccaccggaaccatttctttgtttttcgcaacgaacatgcccaatccactactttaggtccaaaactcatgtttggggtggtttcgcgcaatttcgttgtcgcacgtcgcccattccgaaaacgggtgtcgggtgcatacaaagcacgagtttttgccaccggaaccatttctttgtttttcgcaatgaacatgccccatccactacttagatccaaaactcatgtttggggtggtttctcgcaatttcgttgtcgcacgtcacccattccgaaaacgggtgtcgggtgcatacaaagcacgagtttttccaccggaaccatttctttgtttttcgcaacgaacatgcccaatccactactttaggtccaaaactcatgtttggggtggtttcgcgcaatttcgttgtcgcacgtcgcccattccaaaaacgggtgtcgggtgcatacaaagcacgagtttttgccaccggaaccatttcttcatttttcgcaacgaacatgcccaatcaactactttaggtccaaaactcatgtttggggtggtttcgcgcaatttcgttgccgcacgtcacccattctgaaaacggttgtcggggtgcatacaaagcacgagtttttgccaccggaaccatttcttcgtttttcgcaacgaacatgcccaatccactactttaggtccaaaactcatgtttggggtggtttctcgcaatttcgttgccgcacgtcacccattccgaaaacgggtgtcgggtgcataaaagcacgagtttttgccatcggaaccatttccttgttttccgcaacgaacatgcccaatccactaatttaggtccaaaactcatgtttggggtagtttcgcgcaatttcgttgccgcacatcacccattccaaaaacgggtgtcgggtgcatacaaagcacgagtttttgccaccagaaccatttcttcatttttcgcaacgaacatgcccaatccactactttaggtcctaaactcatgtttggggtggtttcgcgcaatttcattgtcgcacgtcacccattctaaaaacggttgtcgggtgcatataaagcacgagtttttgccaccggaaccatttcttcgtttttcgcaacgaacaagcccaatccactacttcaggtccaaaactcatgtttggggtggtttcgcgcaatttcgttgccgcacgtcacccattccgaaaacgggtgtcgggtgcataaaagcacgagtttttgccaccggaaccatttcttcatttttcgcaacgaacatgcccaatcaactactttaggtccaaaactcatgtttggggtggtttcgcgcaatttcgttgccgcacgtcacccattctgaaaacggttgtcgtggtgcatacaaagcacgagtttttgccaccgaaaccatttcttcatttttcgcaatgaacatgcccaatccactactttaggtccaaaactcatgtttggggtggtttcgcgcaattttgttgtcgcacgtcacccattccgaaaacgggtgtcgggatgcataaaagcacgagttattgccaccagaaccatttcttcgtttttcacaacgaacatgcccaatccactactttaggtccaaaactcatgtttgggttggtttcgctcaatttcgttgtcacacgtcacccattccgaaaacaggtgtcgggtgcatacaaagcacgtgtttttgccaccggaaccatttcttcgtttttcgctacgcacatgcccaatccactactttaggtccaaaactcatgtttggggtggtttcgcgcaatttcgttgtcgcacgtcacccattttgaaaacgagtgtcgggtgcatacaaagcacgagtttttgccaccggaaccatttcttcgtttttcgcaacgaacgtgcccaatccactactttaggtccaaaactcatgtttgggttggtttctcgcaatttcgttgtcgcacgtcacccattctgaaaacgggtgtcgggtgcatacaaagcacgagtttttgccaccggaaccatttcttcgtttttcgcaacgaacatgcccaatccactactttaggtccaaaactcatgtttggggtggtttcgcgcaattttcgttgccgcacgtcacccattccaaaaacgggtgtcgggtgcatacaaagcatgagtttttgccaccagaaccatttcttcgtttttcgcaacgaacatgcccattccactactttaggtccaaaactcatgtgtggggtggtttcacgcaatttcgttgccgcacgtcacccattctgaaaacgggtgtcgggtgcataaaagcacgagtttttgccaccggaaccatttcttcgttttccacaacgaacatgcccaatccactactttaggtccaaaactcatgtttagggtggtttcgcgcaatttcgttgccgcacgtcacccaatccaaaaacggtgtcgggtgcatacaaagcacgagtttttgccaccaaaaccatttcttcgtttttcgcaacgaacatgcccaatccactaatttaggtctgaaactcatgtttggggtggtttcgcgcaatttcgttgacgcacgtcaaccattctgaaaagggttgtcgggtgcata

SEQ ID NO: 659 - DNA, 5553 bp, Zea mays
  source (0)...(0): Zea mays BAC clone full insert sequence contig bacm.pk044.a19.fis8
tgaggtcgacggtatctttacacaagacaagaaatggttccggtggcaaaaactcgtgctttgtatgcaccccgacaaccgttttcagaatgggtgacgtgcggcaacgaaattgcgcgaaaccaccccaaacatgagttttggacctaaagtagttgattgggcatgttcgttgcgaaaaatgaagaaatggttccggtggcaaaaactcgtgctttgtatgcacccgacacccgtttttggaatgggcgacgtgcgacaacgaaattgcgcgaaaccaccccaaacatgagttttggacctaaagtagtggattgggcatgttcgttgcgaaaaacgaagaaatggttccggtggcaaaaactcgtgctttgtatgcacccgacaacccttttcagaatggttgacgtgcgtcaacgaaattgcgcgaaaccaccccaaacatgagtttcagacctaaattagtggattgggcatgttcgttgcgaaaaacgaagaaatggttttggtggcaaaaactcgtgctttgtatgcacccgacaccgtttttggattgggtgacgtgcggcaacgaaattgcgcgaaaccaccctaaacatgagttttggacctaaagtagtggattgggcatgttcgttgtggaaaacgaagaaatggttccggtggcaaaaactcgtgcttttatgcacccgacaccccttttttgaatgggtgacgtgcggcaacgaaattgcgtgaaacccccccccaaatgagtttttgacctaaaatagtggattgggcatgttttttgtgaaaaaaaaagaaaaagttttgggggggaaaaaatcgtgcttcgtatgcaccccgacacccgttttcggaatgggtgacgtgcgacaacgaaattgcgagaaaccaccccaaatatgagttttggacctaaagtagtggattgggcatgttcgttgcgaaaaacgaagaaatggttacggtggcaaaaactcgtgcttttatgcacccgacacccgttttcggaatgggtgacgtgcggcaacgaaattgcgcgaaaccaccccaaacatgagttttggacctaaagtagtggattgggcatgttcgttgcgaaaaacgaagaaatggttctggtggcaaaaactcgtgctttgtatgcacccgacacccgttttcggaatgggtgacgtgcggcaacgaaattgcgcgaaaccaccccaaacatgagttttggacctaaagtagtggattgggcatgttcgttgcgaaaaacgaagaaatggttccggtggcaaaaactcgtgcttttatgcacccgacacccgttttcggaatgggtgacgtgcggcaacgaaattgcgtgaaaccaccccaaacatgagtttcagacctaaagtaatggattgggcatgttcgttgcgaaaaacgaagaaatggttccggtggcaaaaactcatgctttgtatgcacccgacacccgttttcggaatgggtgacgtgcgacaacgaaattgcgcgaaaccaccccaaacatgagatttcgacctaaagtagtggattgggcatgttcgttgcgaaaaacgaagaaatggttccgatggcaaaaactcgtgctttgtatgcatcccaacacccgttttcggaatgggtgacgtgcgacaacaaaattgcgcgaaaccaccccaaacatgagttttggacctaaagtagtggattgggcatgttcgttgcgaaaaacgaagaaatggttccggtggcaaaaactcgtgctttgtatgcaccacgacaaccgttttcagaatgggtgacgtgcgacaacgaaattgcgcgaaactaccccaaacatgagttttggacctaaagtagtggattgggcatgttcgttgcgaaaaacgaagaaatggttccggtggcaaaaactcgtgctttgtatgcacccgacacccgttttaggaatgggtgacgtgcgacaacgaaattgcgcgaaaccaccccaaacatgagttttggacctaaagtagtggattgggcatgttcgttgcgaaaaacgaagaaatggttccggtggcaaaaactcgtgctttgtatgcaccccgacaaccgttttcagaatgggtgacgtgcggcaacgaaattgcgcaaaaccaccccaaacatgagttttggacctaaagtagtggatagggcatgttcgttgcgaaaaaggaagaaatggttccggtggcaaaaagtcgtgctttgtatgcacccgacactcgttttcggaatgggtgacgtgcgacaacaaaattgcgcgaaaccaccccaaacatgagatttggacctaaagtagtggattgagcatgttcgttgcgaaaaacgaagaaatggttccggtggcaaaaactcgtgctttgtatgcatcccgacacccgtttcccgaatgggtgacgtgcggcaacgaaattgcgcgaaaccaccccaaacatgagttttggacctaaagtagtggattgggcatgttcgttgagaaaaacaaagaaatggttttggtggcaaaaactcgtgctttgtatgcatcccgacacccgtttttggaatgggtgacgtgggccaacgaaattgcgggaaaccaccccaaacatgagttttggacctaaagtagtggattgggcatgttcgttgcggaaaacgaagaaatggttccggtggcaaaaactcgtgctttgtatgcggggtgacaaccgttttcacaatgggtgacgtgcggcaacgaaattgcgagaaaccaccccaaacatgagttttggacctaaagtagtggattgggcatgttcgttgcgaaaaacgaagaaatggttccggtggcaaaaactcgtgctttgtatgcacccgacacccgttttcgaaatgggtgacgtgcgacaatgaaattgcgcgaaaccaccccaaacatgagttttggacctaaagtagttgattgggcatgttcgttgcgaaaaatgaagaaatggttccggtggcaaaaactcgtgctttgtatgcacccgacacccgttttcggaatgggcgacgtgcgacaacgaaattgcgcgaaaccaccccaaacatgagttttggacctaaagtagtggattgggcatgttcgttgtgaaaaaaaaaaaatggttccggtggaaaaactcgtgctttgtatgcacccgacacccgttttcggaatgggtgacgtgcggcaacgaaattgcgcgaaaccaccccaaacatgagttttggacctaaagtagtggattgggcatgttcgttgcgaaaaacaaagaaatggttccggtggcaaaatcttgtgcatttatgcacccgacacccgttttcggaatgggtgacgtgcggcaaccaaattgcgagaaaccacccccaacatgagttttggacctaaagtagtggattgggcatgttcgttgcgaaaaacaaaaaaatggttccggtggcaaaaaatggtgctttgtatgcacccgacaccccttttttgaataggtgacgtgcgacaacgaaattgcgagaaaccaaccaaaacatgagatttggacctaaagtagtggattgggcacgttcgttgcgaaaaacgaagaaatggttccggtggcaaaaactcgtgctttgtatgcggcccgacaatcgttttcaaaatggatgacgtgcgacaacgaaattgtgcgaaaccaccccaaacatgagttttggacctaaagtagtggattgggcatgtgcgtagcgaaaaacgaagaaatggttccggtggcaaaaactcatgctttgtatgcacccgacacctgttttcggaatgggtgacgtgtgacaacgaaattgagcgaaaccaacccaaacatgagatttggacctaaagtagtggattgggcatgttcgttgtgaaaaacgaagaaatggttctggtggcaataactcgtgcttttatgcacccgacacccgttttcggaatgtgtgacgtgcgacaacaaaattgcgcgaaaccaccccaaacatgagttttggacctaaagtagtggattgggcatgttcgttgcgaaaaatgaagaaatggttctggtggcaaaaactcgtgctttgtatgcacccgacacccgtttttggattgggtgacgtgcggcaaggaaattgcacgaaaccaccccaaacatgagttttggacctaaagtagtggattgggcatgttcgttgtggaaaacgaacaaatggttctggtggcaaaaactcgtgcttttatgcacccgacacccgttttcggaatgggtgacgtgcggcaacgaaattgcgagaaaccaccccaaacatgagtttcagacctaaagtagtggattgggcatgttcgttgcgaaaaacgaagaaatggttctggtggcaaaaactcatgctttgtatgcacacgacacccgttttcggaatgggtgacgtgcggcaacgaaattgcgtgaaaccaccccaaacatgagttttggacctaaagtagtggattgggcatgttcgttgcgaaaaacgaagaaatggttatggtggcaaaaactcatgctttgtatgcacccgacacccgttttcagaatgggtgacgtgcgacaacgaaattgcgcgaaaccaccccaaacatgagttttggacctaaagtagtggattgggcatgttcgttgcgaaaaacgaagaaatggttctggtggcaaaaactcgtgcttgtatgcacccgacacccgtttttggattgggtgacgtgcggcaacgaaattgcgcgaaaccaccccaaacatgagttttggacctaaagtagtggattgggcatgttcgttgcgaaaaacgaagaaatggttccggtggcaaaaactcgtgctttgtatgcacccgacaacccttttcagaatggttgacgtgcgtcaacgaaattgcgcgaaaccaccccaaacatgagtttcagacctaaattagtggattgggcatgttcgttgcgaaaaacgaagaaatggttttggtggcaaaaactcgtgctttgtatgcacccgacaccgtttttggattgggtgacgtgcggcaacgaaattgcgcgaaaccaccctaaacatgagttttggacctaaagtagtggattgggcatgttcgttgtggaaaacgaagaaatggttccggtggcaaaaactcgtgcttttatgcacccgacacccgttttcggaatgggtgacgtgcggcaacgaaattgcgtgaaaccaccccaaacatgagtttcagacctaaagtagtggattgggcatgttcgttgcgaaaaacgaagaaatggttctggtggcaaaaactcatgctttgtatgcacccgacacccgttttcggaatgggtgacgtgcgacaacgaaattgcgcgaaaccaccccaaacatgagatttcgacctaaagtagtggattgggcatgttcgttgcgaaaaacgaagaaatggttcctatggcaaaaactcgtgctttgtatgcatcccgacacccgttttcggaatgggtgacgtgcgacaacaaaattgcgcgaaaccacccca

SEQ ID NO: 660 - DNA, 4596 bp, Zea mays
  source (0)...(0): Zea mays BAC clone full insert sequence contig bacm.pk044.a19.fis9
tgaaggttcttcatccccacatgtgctaaacggcgatgccacaaccagcacatgttagtcttagcaattaagcatgcatctagaccggcctcctcttttgcaaaatcaactaaataaagtttgccgtctagtatacccttaaaagctaatgaaccatcacttcttctaaagacagacacatctacatttgtgaataaacagttatatcccatattacacagttggctcacagacaacaagttatatccaagcgactcaactaagaacacattagaaatagagtgctcggatgaaatagcaatttttcctaacccttttaccttgccttggttcccatcactgaatatgattgaatcttggggatccttgttcttgacataggaagagaacatcctcttttcccccgccatgtggttagtgcatccgctgttgataatccagcttgagccccggatgcataaacctgcgaggcaaatttaggcttgggtcttaggtacccaactcttgttgggtcctacaaggttagtacaaatagccttagggacccaaatgcaagttttatcttccttgcattttgcccctaattttctagcaactatcttcttatcctttctacaaatagcaaaggaagcatttaaagcatgatagattgtagaaggttcattacttgttttcctagttacatgagcatttctcctaggcacatgttgaatgacatttttcctggccaaacttcttgttgaatgacatttttcctggccaaacttctatcatacatcatagaagaacttgaagcaagcattgcatttgaatcataagcatgtgaaacaacatcattgcaacttctatcatggtgaacattcctagaatatttcctatcatggtataagaaagcatggttcttttgaatactatttgccataggggccttccctttctcgttgatggagatgggagccttatgacttgtcaagttcttggcttccctcttgaagccaagcccatccttaattgaggggtgtctaccaaccgtgtagacatcccttgcaaattttagtttatcaaaatcatttttgctagtcttaagttgggcattaagactagccacttcatcattcagtttagaaattgaaactaggtgttcactacaagcatcaacattaaaatctttacacctattgcaaactacaacatgttctacacaagatgttgatttattagctatttctaacttagcactcaaatcattatttatgctctttaagctagaaatagagtcatgacatgtagacaattcacaagaaagcatttcattccttgttatttctaaagcaagggatttttgtgcctctacaaacttatcatgttcttcatacaaaagatcctcttgcttttctaataacctatttttatcattcaaggcatcaattaattcattaatcttatcaaccttagttctatctaggcccttgaataaacatgaatagtctatttcatcatcgctagattcttcatcacttgaggaagcgtaagtactattatcacgagtgcttaccttcctttcccttgccatgaggcaggtgtgatgctcgtcggggaagagggccgacttgttgaaggcggtggtggtgagtccttcgttgtcggagtcggacgacgaacaatctgagtcccactcctttccaaggtgtgcctcgcccttagccttcttgtaagtcttcttcttttccctcttgttcccttgttcctggtcactatcattatcgggacaattagcgataaaatgaccaatcttaccacatttgaagcatgagcgcttccccttcgtcttggtcttgttgggatgctccttgcgaccccttagcgacgtcttgaaacgcttgatgatgagggccatttcttcatcattaagcccggccgcctcaacttgtgccaccttgcttggtagcgcctccttgctcctcgatgctttgagagcaatggtttgaggctcttggattgggccattcaacacatcatcaacgtatctggcctccttgatcatcatccgcccgcttacgaactttccaagtatctcctcgggcgtcatcttggtgtacctaggattctcacgaatattgttcacaagatgtggatcaaggacagtaaaagaccttagcattaggaggacaacgtcgtggtccttccatcgcgtgcttccatagctccttattttgttgactagggtgttgagccggttgtacgtttgggttggctcctcgcccctgatcattgcgaatctcccaagttcgccctccaccaactccatcttggtgagcatggtgacgtcgttcccctcatgagagattttgagggtgtcccaaatctgcttggcgttatccaagccacacaccttatggtattcatccctgtacaatgaagctagaagaacagtagtagcttgtgcatttttgtgaatttgctcattaatgaacatgggactatccgtactatcaaagtgcattccattttctactatctcccatatacttggatggagagagaacaagtggctacgcattttgtggctccaaaatccgtagtcctctccatcaaagtggggaggtttaccgtggggaatggaaagcaagtgagcattggaactttgcggaatacgagaataatcaaaggaaaagtttgaattaaccgtcttctttttctcgtagtcgttgtcgtcgtccttttgggaagaggaagattcgtcgctgtcgtagtagactatctccttgatgcgccttgtcttcttcttcctcccgtcttttcttttgtggcccgagcctgagttagtaggcttgtcatcctttggatcattgacgaaggactccttctccttatcattgaccaccatccccttgcccttaggatccatctcttcgggcgattagtccctttcttgaagagaacggttctgataccaattgagagcacctagagggggggtgaataggtgatcctgtaaaacttaaaacttaacaccacaaacttgattaagagttagaacaatgaaatcaagtgagtagagagaagagctcttgtgaagcacaatagacacaataaggacaagcacaagagacacgaggatttatcccgtggttcggccaagtacaaaacttgcctattccacgttgtggcgtcccaacggacgagagttgcactcaactcctctcaagtgatccaatgatcaacttgaataccacggtgttcttctttactttactctttcccgtttgcgaggaatctccacaacttggagtctctcgcccttacaataagaatcacaatgaagcacaagagtaagggatggaagcaacacactcaaatccacagcaaatacgcacacacaagagcaagacttgagctcaatacaatatctcgaggttctcactagaacagagctcaaatcactaagagtgtcgaacaagtgcgcaagaatgaagtgtgagtgatcaacaatgctcaaggaatgctttgtgtactcctccatgcgcctaggggtcccttttatagccccaaggcagctaggagccattgagagcatttcaagaaggcaattcttgccttctatcgtctggcgcaccggacagtccggtgcaccaccggacactgtccggtgcggatttctttccttctttggcgaagccaaccgttggcgctttggagccgttggcgcaccggacactgtccggtgcacagcggacagtccgatgccccttcagaccgttggctcttgccacgcgtcgcgtgcggattacgcggccgaccgttggcctagcctactgttggctcaccggacagtccggtgcaccaccggatagtccgatgatttatagccgcacgccaccgtcgaagtcccgagagcggctagttcgccagagccagcctggcgcaccagacactgtccggtgcaccaccggacagtccggtgtacccagactgagcagacttttggctgcttcgagccaagtttttccaattgatttttctctaattctagcacatagacaaacatgttagtacacaaaaaccaatgtattaagtctagaatcatacctttgtatttgatttgcactttgtccatcacttagcatagattatcataagtcccctcgtgttggcactcaatcaccaaaatacttaaaatggcccaagggcacatttccctttcagttttcggaatgggcgacgtgcgacaacaaaattgcgagaaaccaccccaaacatgagttttggacctaaagtagtggagtgggcatgttcgttgcgaaaaaacgaagaaatggttcaggtggcaaaaactcgtgcttttatgcacccgacacccgttttcggaatgggtgacgtgcggcaacgaaattgcgcgaaaccaccgcaaacatgagttttggacctaaagaagtggattgggcatgttcgttgcgaaaaacgaagaaacggtttcgggggaaaacttgtggttttatgcacccgacacctgttttcggaatgggtgacgtgcgacaacgaaattgcgcgaaaccaccccaaacatgagttttggacctaaagtatcaagggaaa

SEQ ID NO: 661 - DNA, 7057 bp, Zea mays
  source (0)...(0): Zea mays BAC clone full insert sequence contig bacm.pk044.a19.fis10
aatttcgttgccgcacgtcacccattccgaaaacgggtgtcgggtgcataaaagcacgagtttttgccaccgtaaccatttcttcgtttttcgcaacgaacatgcccaatccactactttaggtccaaaactcatgtttgggggtggtttcgctcaatttcgttgtcgcacgtcacccattccgaaaatgggtgtcgggtgcataaaagcacgagtttttgccaccagaaccatttattcgtttttcacaacgaacatgcccaatccattactttaggtccaaaactcatgtttgggttagtttcgcgcaatttcgttgtcgcacgtcacccattccgaaaacgggtgtcgggtgcatacaaagcacgagtttttgccaccggaaccgtttcttcgtttttcgcaacgcacatgcccaatccactactttaggtccaaaactcatgtttggggtggtttcgcgcaatttcgttgtcgcacgtcacccattctgaaaacggttgtcgggtgcatacaaagcacgagtttttgccaccggaaccatttcttcgtttttcgcaacgaacatgcccaatccactactttaggtccaaaactcatgtttgggttggttttgcgcaatttcgttgtcgcacgtcacccattccgaaaacgggtgtcgggtgcatacaaagcacgattttttgccactggaaccatttcttcgtttttcgcaacaaacatgcccaatccactactttaggtccaaaactcatgtttggggtggtttctcgcaatttcgttgccgcacgtcacccattccaaaaacgggtgtcgggtgcataaaaccacaagattttgccaccagaaccatttcttcctttttcgcaacgaacatgcccaatccactactttaggtccaaaactcatgtttggggtggtttcgctcaatttcgttgtcgcacgtcacccattccgaaaatgggtgtcgggtgcataaaagcacgagttattgccaccagaaccatttcttcgtttttcacaacgaacatgcccaatccactactttaggtccaaaactcatgtttgggttggtttcgctcaatttcgttgtcacacgtcacccattccgaaaacaggtgtcgggtgcatacaaagcacgtgtttttgccaccggaaccatttcttcgtttttcgctacgcacatgcccaatccactactttaggtccaaaactcatgtttggggtggtttcgcgcaatttcgttgtcgcacgtcacccattccgaaaacgggtgtcggggtgcatacaaagcacgagtttttgccaccggaaccatttcttcgtttttcgcaacaaacatgcccaatccactactttaggtccaaaactcatgtttggggtggtttcacgcaatttcgttgtcgcacgtcacccattccgaaaacgggtgtcgggtgcatacaaagcacaagtttttgccaccggaaccatttttttgtttttcgcaacgaacatgccctatccactactttaggtccaaaactcatgtttggggtggtttcgctcaatttctttgtcgcacgtcacccattctgaaaacggttgtcgggtgcatacaaagcacgagtttttgccaccggaaccatttcttcgtttttcgcaacgaacatgcccaatccattactttaggtccaaaactcatgttgggggtggtttcgcgcaatttcgttgtcgcacgtcacccattctgaaaacggttgtcgggtgcatacaaagcacgagtttttgccaccggaaccatttcttcgtttttcgcaacgaacatgcccaatccactactttaggtccaaaactcatgtttggggtggtttcgcgcaatttcgttgtcgcacgtcacccattcagaaaacgggtgtcgggtgcatacaaagcacgagtttttgccaccggaaccatttcttcatttttcgcaacgaacatgcccaatcaactactttaggtccaaaactcatgtttggggtggtttcgcgcaatttcgttgccgcacgtcacccattctgaaaacggttgtcgtggtgcatacaaagcacgagtttttgccaccgaaaccatttcttcgtttttcgcaatgaacatgcccaatccactactttaggtccaaaactcatgtttggggtggtttcgcgcaattttgttgtcgcacgtcacccattccgaaaacgggtgtcgggatgcatacaaagcacgagtttttgccataggaaccatttcttcgtttttcgcaacgaacatgcccaatccactactttaggtcgaaatctcatgtttggggtggtttcgcgcaatttcgttgtcgcacgtcacccattccgaaaacgggtgtcgggtgcatacaaagcatgagtttttgccaccagaaccatttcttcgtttttcgcaacgaacatgcccaatccactactttaggtctgaaactcatgtttggggtggtttcacgcaatttcgttgccgcacgtcatccattttgaaaacggttgtcgggtgcatacaaagcacgagtttttgccaccggaaccatttcttcgtttttcgcaacgaacgtgcccaatccactactttaggtccaaaactcatgttttggttggtttctcgcaatttcgttgtcgcacgtcacctattctgaaaacgggtgtccggtgcatacaaagcacgaatttttgccaccggaaccatttcttcgtttttcgcaacgaacatgcccaatccactactttaggtccaaaactcatgtttggggtggtttcgcgcaatttcgttgccgcacgtcacccattccaaaaacgggtgtcgggtgcatacaaagcacgagtttttgccaccggaaccatttcttcgtttttcgcaacgaacatgcccattccactactttaggtcctaaactcatgtttggggtggtttcacgcaatttcgttgtcgcacgtcacccattctgaaaacgggtgtcgggtgcataaaagcacgagtttttgccaccggaagcatttctttgtttttcgcaacgaacatgcccaatccactactttaggtccaaaactcatgtttggggtggtttcgctcaatttctttgtcgcacgtcactcattccgaaaatgggtgtcgggtgcataaaagcacgagtttttgccaccagaaccatttcttcgtttttcagaacaaacatgcccaatccactactttaggtccaaaactcatgtttggggtggtttcacgcaatttcgttgtcgcacgtcacccattccgaaaacgggtgtcgggtgcataaaaccacaagtttttgccaccggaaccatttctttgtttttcgcaacgaacatgcccaatccactactttaggtccaaaactcttatttgaggtggtttcgtacaatttcgttgccgcacgtcacccattgtgaaaacggttgtcaccccgcatacgaagcacgagattttgccaccggaaccatttcttcgtttttcgcaatgaacatgcccaatccactactttaggtccaaaactcatgtttggggtggtttcgcgcaatttcgttgtcgcacgtcacccattctgaacacggttgtcgggtgcatacaaagcacgagtttttgccaccggaaccatttcttcgtttttcgcaacgaacatgcccaatcagtaggtccaaaactcatgtttggggtggtttcgcgcaatttcgttgccgcacgtcacccattccgaaaacgggtgtcgggtgcataaaaacatgagttttttccaccggaaccatttctttgtttttcgcaatgaacatgctccatccactacttagatccaaaactcatgtttggggtggtttctcgcaatttcgttgtcgcacgtcacccattccgaaaacgggtgtcgggatgcatacaaagcacgagtttttccaccggaaccatttctttgtttttctcaacgaacatgcccaatccactactttaggtccaaaactcatgtttggggtggtttcgcgcaattttgttgtcgcacgtcacccattccgaaaacgggtgtcgggatgcatacaaagcacgagtttttgccaccggaaccatttcttcgtttttcacaacgaacatgctcaatccactactttaggtccaaatctcatgtttggggtggtttcgcgcaattttgttgtcgcacgtcacccattccgaaaacgggtgtcgggtgcatacaaagcacgagtttttgccaccggaaccatttcttcctttttcgcaacgaacatgccctatccactactttaggtccaaaactcatgtttggggtggttttgcgcaatttcgttgccgcacgtcacccattctgaaaacggttgtcggggtgcatacaaagcacgagtttttgccaccggaaccatttcttcgtttttcgcaacgaacatgcccaatccactatttaggtccaaaactcatgtttggggtggtttcgcgcaatttcgttgtcgcacgtcacccattcctaaaacgggtgtcgggtgcatacaaagcacgagtttttgccaccggaaccatttcttcgtttttcgcaacgaacatgcccaatccactactttaggtccaaaactcatgtttggggtagtttcgcgcaatttcgttgccgcacgtcacccattctgaaaacggttgtcgtggtgcatacaaagcacgagtttttgccaccggaaccatttcttcgtttttcgcaacgaacatgcccaatccactactttaggtccaaaactcatgtttggggtggtttcgcgcaattttgttgtcgcacgtcacccattccgaaaacgggtgtcggggtgcatacaaagcacgagttttttgccaccgaaaccatttcttcgtttttcgcaactaacatgcccaatccactactttaggtccaaaactcatgtttggggtggtttcacgcaatttcgttgtcgcacgtcacccattcaaaaaaggggtgtggggtgcataaaagcacgagtttttgccaccggaagcatttctttgtttttcgcaacgaacatgcccaatccactactttaggtccaaaactcatgtttggggtggtttcgctcaatttctttgtcgcacgtcactcattccgaaaatgggtgtcgggtgcataaaagcacgagtttttccaccggaaccatttctttgtttttcacaacgaacatgcccaatccactactttaggtccaaaactcatgtttggggtggtttcgcgcaatttcgttgtcgcacgtcgcccattccgaaaacgggtgtcgggtgcatacaaagcacgagtttttgccaccggaaccatttcttcatttttcgcaacgaacatgcccaatcaactactttaggtccaaaactcatgtttggggtggtttcgcgcaatttcgttgtcgcacgtcacccattccgaaaacgggtgtcgggtgcataaaagcacgagtttttgccaccagaaccatttcttcgtttttcagaacaaacatgcccaatccactactttaggtccaaaactcatgtttggggtggtttcacgcaatttcgttgtcgcacgtcacccattccgaaaacgggtgtcgggtgcataaaaccacaagtttttgccaccggaaccatttctttgtttttcgcaacgaacatgcccaatccactactttaggtccaaaactcatgtttggggtggtttcgctcaatttcgttgtcgcacgtcacccattccgaaaatgggtgtcgggtgcataaaagcacgagattttgccaccggaaccatttcttcgtttttcgcaacgaacatgcccaatacactactttaggtccaaaactcatgtttggggtggtttcgcgcaatttcgttgccgcacgtcacccattccgaaaacgggtgtcgggtgcatacaaagcacgagtttttgccaccggaaccatttcttcgtttttcgcaacgaacatgcccaatccactactttaggtcctaaactcatgtttggggtggtttcgcgcaatttcgttgtcgcacgtcacccattctgaaaacggttgtcgggtgcataaaaacacaagtttttgccaccagaaccatttcttcgtttttcgcaacgagcatgcccaatccactactttaggtccaaaactcatatttggggtggtttctcgcaaattcgttgtcgcacgtcacccattccgaaaacgggtgtcgggtgcatacaaagcacgagtttttgccaccggaaccatttcttcgtttttcgcaacgaacatgcccaatccactactttaggtcctaaactcatgtttggggtggtttcccgcaatttcgttgtcgcacgtcacccattctgaaaacggttgtcgggtgcatacaaagcacgagtttttgccaccggaaccatttctttgtttttcacaacgaacatgcccaatccactactttaggtccaaaactcatgtttgggttggtttcgcgcaatttcgttgtcgcacgtcacccattccgaaaatgggtgtcgggtgcatacaaagcacgagtttttgccaccggaaccatttcttcgtttttcgcaacgaacatgcccaatccactactttaggtccaaaactcatgtttgggatggtttctcacaattttgttgtagcatgtcacccattccgaaaacggttgtcgggtgcaaacaaagcacgagtttttgccaccggaaccatttcttcgtttttcgcaaacgaacatgcccaatccacttctttaggtccaaaactcatgtttgcggtggtttcgcgcaatttcgttgccgcacgtcacccattccgaaaacgggtgtcgggtgcataaaagcacgagtttttgccacctgaaccatttcttcgttttttcgcaacgaacatgcccactccactactttaggtccaaaactcatgtttggggtggtttctcgcaattttgttgtcgcacgtcgcccattccgaaaactgaaagggaaatgtgcccttgggccattttaagtattttggtgattgagtgccaacacga

SEQ ID NO: 662 - DNA, 10198 bp, Zea mays
  source (0)...(0): Zea mays BAC clone full insert sequence contig bacm.pk044.a19.fis11
  misc_feature (1)...(10198): n = A,T,C or G
tgggtgcccaccccaaacttgttttttgtattataggtagtgggggggggcctttttattgaaaaaagaaagaattggtttggggggaaaaaaatttttttttttttgcccccgcctcccttttttgaagggggggagtggggaaaaaaaatttgggggaaccccccccaaccttgggttttggacttaaggaggggggtggggctttttcgtgggaaaaaaaaaaaaaatgtttcggggggaaaaaattgttgttttttatccccccggccaccttttttgggatggggggacgggggaaaaggaattggggcgaaccccccccaaacttggttttgggccttaaggtgggggatggggcatgttcgttgaaaaaaacaaagaattggttcgggtgaaaaaactcgtgctttgtatgcatcccgacaccggttttgggaatgggtgacgtgcgacaacgaaattgcgagaaaccaccccaaacatgagttttggatctaagtagtggatggggcatgttcattgcgaaaaacaaagaaatggttccggtggaaaaaactcatgtttttatgcacccgacacccgttttcggaatgggtgacgtgcggcaacgaaattgcgcgaaaccaccccaaacatgagttttggacctactgattgggcatgttcgttgcgaaaaacgaagaaatggttccggtggcaaaaactcgtgctttgtatgcacccgacaaccgtgttcagaatgggtgacgtgcgacaacgaaattgcgcgaaaccaccccaaacatgagttttggacctaaagtagtggattgggcatgttcattgcgaaaaacgaagaaatggttccggtggcaaaatctcgtgctttgtatgcggggtgacaaccgttttcacaatgggtgacgtgcggcaacgaaattgtacgaaaccacctcaaacaagagttttggacgtaaagtagtggattgggcatgttcgttgcgaaaaacgaagaaatgattccggtggcaaaaacacgtgctttgtatgcacccgacacccgtttttggaatgggtgacgtgcgacaacgaaattgtgcgaaagcaccccaaacaagagttttggacctaaagtagtggattgggcatgttcgttgcaaaaacgaagaaatggttccggtggcaaaaactcgtgcttttatgcaccccgatacccgtttttggaatgggagacgtgcgacaacgaaattgcgcgaaaccacctcaaacatgagttttggacctaaagtagtggattgggcatgttcgttgcgaaaaacaaaaanaagttccggtggcaaaacctcgtgcttatgcaccccgacacccgttttcggaatgggtgacgtgcgacaacaaaattgcgtgaaaccaccccaaacatgagttttggacctaaagtagtggattgggcatgttcgttgcgaaaacgaagaaatggttccgatggcaaaaactcgtgctttgtatgcaccccccgacaaccgttttcagaatgggtgacgtgcggtaacgaaattgcgcgaaaccaccccaaacatgagttttggacctaaagtagtggattgggcatgttagttgcgaaaaacgaagaaatggtttcggtggcaaaaaactcgtgctttgtatgcaccccgacacccgttttcggaatgggtgacgtgcgacaacaaaattgcgcgaaaccaccccaaacatgagttttggacctaaagtagtggattgggcatgttcgttgcgaaaaacgaagaaatgtttccggtgtcaaaaactcgtactttgtatgcaccacgacaaccgttttcagaatgggtgacgtgcgacaacgaaattgcgcgaaactaccccaaacatgagttttggacctaaagtagtggattgggcatgttcgttgcgaaaaacgaagaaatggttccggtggcaaaaactcgtgctttgtatgcacccgacacccgttttaggaatgggtgacgtgcgacaacgaaattgcgcgaaaccaccccaaacatgagttctggacctaaagtagtggattgggcaggttcattgcgaaaaaaaaaaaaatggttccggtggcaaaaaatcgtgctttgtatgccccccgaccacccttttttaaaatgggtgacgtgggacaaaaaaattgcgcaaaacccccccaaacaggagttttggacctaaaataggggattgggcatgtttgttgcaaaaaaagaaaaaatggttccggtggcaaaaactcgtgctttgtatgcacccgacacccgttttaggaatgggtgacgtgcgacaacgaaattgcgcgaaaccaccccaaacatgagttttggacctaaagtagtggattgggcatgttcgttgcgaaaaacgaagaaatggttccggtggcaaaaacttgtggttttatgcaccccgacacccgttttcggaatgggtgacgtgcgacaacgaaattgcgtgaaaccaccccaaacatgagttttggacctaaagtagtggatagggcatgtttgttgcgaaaaacgaagaaatggttccggtggcaaaaaactcgtgcttcgtatgcaccccgacacccgttttcggaatgggtgacgtgcgacaacgaaattgctagaaaccaccccaaatatgagttttggatctaaagtagtggattgggcatgttcgttgcgaaaaacgaagaaatggttacggtggcaaaaactcgtgcttttatgcacccgacacccgttttcggaatgggtgacgtgcggcaacgaaattgcgcgaaaccaccccaaacatgagttttggaccttaagtagtggattgggcatgttcgttgcgaaaaacgaagaaatggttctggtggcaaaaactcgtgctttgtatgcacccgacacccgttttcggaatgggtgacgtgcggcaacgaaattgcgcgaaaccaccccaaacatgagttttggacctaaagtagtggattgggcatgttcgttgcgaaaaacaaagaaatggttctggtggcaaaatcttgtgcttttatgcacccgacacccgttttcggaatgggtgacgtgcggcaatgaaattgcgagaaaccaccccaaacatgagttttggacctaaagtagtggattgggcatgttcgttgcgaaaaacgaagaaatggttccagtggcaaaaactcgtgggttgtatgcacccgacacccgttttcggaatgggtgacgtgcgacaacgaaattgcgcgaaaccaacccaaacatgagttttggacctaaagtagtggattgggcatgttcgttgtgaaaaacgaagaaatggttccggtggcaaaatcttgtgcttttatgcaccggacacccgttttcggaatgggtgacgtgcggcaacgaaattgcgagaaatcaccccaaacatgagttttggacctaaagtagtggattgggcatgttcgttgcgaaaaacgaagaaatggttccggtggcaaaaactcgagcttttatgcacgcgacacccgttttcggaatgggtgacgtgcgacaacgaaattgcgtgaaaccaccccaaacatgagtttaggacctaaagtagtggaatgggcacgttcgttgcggaaaacgaagaaatggttccggtggcaaaaactcgtgcttttatgcacccgacactcgttttcggaatgggtgacgtgcggcaacgaaattgcgtgaaaccaccccaaacatgaattttggaccaaaagtagtggattgggcatgttctttgcgaaaaacgaagaaatggttccggtggcaaaaactcgtgctttgtatgcacccgacaacccttttcagaatgggtgacgtgcgacaacgaaattgcgcgaaaccaccccaaacatgagttttggacctaaagtagtggattgggcatgttcgttgcgaaaaatgaagaaatggttctggtggcaaaaactcgtgctttgtatgcaccccacacccctttttggaatgggtgacgtgcggcaaggaaattgcgcgaaaccaccccaaacatgagttttggacctaaagtagtggattgggcatgttcgttgtgaaaaacaaagaaatggttccggtggcaaaaactcgtgcttttatgcacccgacacccgttttttgaatgggtgacgtgcgacaacgaaattgcgggaaaccaccccaaacatgagtttaggacctaaagtagtggattgggcatgttcgttgcgaaaaacgaagaaatggttccggtggcaaaaactcgtgctttgtatgcacccgacacccgttttcggaatgggtgacgtgcgacaacgaatttgcgagaaaccaccccaaatatgagttttggacctaaagtagtggattgggcatgctcgttgcgaaaaacgaagaaatggttctggtggcaaaaacttgtgtttttatgcacccgacaaccgttttcagaatgggtgacgtgcgacaacgaaattgcgcgaaaccaccccaaacatgagtttaggacctaaagtagtggattgggcatgtttgttctgaaaaacgaagaaatggttctggtggcaaaaactcgtgcttttatgcacccgacacccattttcggaatgggtgacgtgcgacaacgaaattgagcgaaaccaccccaaacatgagttttgtacctaaagtagtggattgagcatgttcattgcgaaaaacgaagaaatggttccggtggcaaaaacttgtggttttatgcacccgacacccgttttcggaatgggtgacgtgcgacaacgaaattgcgtgaaaccaccccaaacatgagtttaggacctaaagtagtggattgggcatgttcgttgcgaaaaacgaagaaatggtaccggtggcaaaaactcgtgctttgtatgcacccaacacccgtttttggaatgggtgacgtgcggcaacgaaattgcgcgaaaccaccccaaacatgagttttggacctaaagtagtgtattgggcatgttcgttgcgaaaaacgaagaaatggttccggtggcaaaaactcgtgctttgtatgcacccgacacccgttttcggaatgggtgacgtgcggcaacgaaattgcgcgaaaccaccccaaacatgaattttggacctaaagtagtggattgggcatgttcgttgcgaaaaacgaagaaatggttccggtggcaaaatctcgtgcttttatgcacccgacacccattttcggaatgggtgacgtgcgacaacgaaattgagcgaaaccacccaccccaaacatgagttttggacctaaagtagtggattgggcatgttcgttgtgaaaaacgaagaaatggttccggtggcaaaaactcgtgctttatatgcacccgacacccgttttcggaatgggtgacgtgcggcaacgaaattgcgcgaaaccaccccaaacataagttttggacctaaagtagtggattgggcatgttcgttgtgaaaaacgaagaaatggttctggtatcaaaatctcgtgcttttatgcacccgacacccgttttcggaatgggtgacgtgcggcaatgaaattgcgagaaaccaccccaaacatgagttttggacctaaagtagtggattgggcatgttcgttgcgaaaaacgaagaaatggttccggtggcaaaaactcgtgctttgtatgcacccgacacccattttcggaatgggtgacgtgcgacaacgaaattgcgcgaaaccaacccaaacatgagttttggacctaaagtagtggattgggcatgttcgttgtgaaaaacaaagaaatggttccggtggcaaaaactcgtgctttgtatgcacccgacaaccgttttcagaatgggtgacgtgcgacaacgaaattgcgggaaaccaccccaaacatgagtttaggacctaaagtagtggattgggcatgttcgttgcgaaaaacgaagaattgcttccggtggcaaaaactcgtgctttgtatgcacccgacacccgttttcggaatgggtgacgtgcgacaacgcaattgtgagaaaccaccccaaacatgagttttggacctaaagtagtggattgggcatgttcgttgcgaaaaacgaagaaatggttctggtggcaaaatcttgtgcttttatgcacccgacacccgttttcggaatgggtgacgtgcggcaacgaaattgcgagaaaccaccccaaacatgagttttggacctaaagtagtggattgggcatgttcgttgcgaaaaacgaagaaatggttccggtggcaaaaactcatgcgttgtatgcacccgacacccgttttcggaatgggtgacgtgcgacaacgaaattgcgcgaaaccaacccaaacatgagttttggacctaaagtagtggattgggcatgttcgttgcgaaaaacgaagaaatggttctggtggcaaaattttgtgcttttatgcaccggacacccgttttcggaatgggtgacgtgcggcaacgaaattgcgagaaaccaccccaaacatgagttttggacctaaagtagtggattgggcatgttcgttgcgaaaaacgaagaaatggttccggtggcaaaaactcctgcgttgtatgcacccgacacccgttttcggaatgggtgacgtgcgacaacgaaattgcgtgaaaccaccccaaacatgagttttggacctaaagtaatggattgggcatgttcgttgcgaaaaacgaagaaatggttccggtggcaaaaactcgtgctttttatgcaccggacaccctttttgggaatgggtgacgtgcgacaaggaaattgggggaaaccaccccaaacatgaattttggacttaaagtagcggattgggcatgttcgttgtgaaaaacgaagaaatggttccggtggcaaaaacttgtggttttatgcacccgacacccgttttcggaatgggtgacgtgcgacaacgaaattgcgcgaaaccaccccaaacatgagttttggacctaaagtagtggattgggcttgttcgttgcgaaaaactaggaaatggttccggtggcaaaaactcgtgcttttatgcacccaacacccgttttcggaatgggtgacgtgcggcaacgaaattgcgagaaaccaccccaaacatgagttttggacctaaagtagtggattgggcatgttcgttgtgaaaaacgaagaaatggttccggtggcaaaaactcgtgctttgtatgcccccgaaacccgttttcagaaagggtgacgtgcgacaacgaaattgcgcgaaaccaccccaaacatgagttttggacctaaagtagtggattgggcatgttcgttgcggaaaacgaagaaatggttccggtggcaaaaactcgtgctttgtatgcggggtgacaaccgttttcacaatgggtgacgtgcggcaacgaaattgcgagaaaccaccccaaacatgagttttggacctaaagtagtggattgggcatgttcgttgcgaaaaacgaagaaatggttccggtggcaaaaactcgtgctttgtatgcacccgacacccgttttcgaaatgggtgacgtgcgacaatgaaattgcgcgaaaccaccccaaacatgagttttggacctaaagtagttgattgggcatgttcgttgccaaaaacgaagaaatggttccggtggcaaaaactcgtgctttgtatgcacccaaccccctttttcggaatgggcgacgtgcgacaacaaaattgcgagaaaccaccccaaacatgagttttggacctaaagtagtggagtgggcatgttcgttgcgaaaaaacgaagaaatggttcaggtggcaaaaactcgtgcttttatgcacccgacacccgttttcggaatgggtgacgtgcggcaacgaaattgcgcgaaaccaccgcaaacatgagttttggacctaaagtagtggattgggcatgttcgttgcgaaaaacgaagaaatggttccggtggcaaaaactcgtgctttgtatgcacccgacacccattttcggaatgggtgacgtgcgacaacgaaattgcgcgaaaccaacccaaacatgagttttggacctaaagtagtggattgggcatgttcgttgtgaaaaacaaagaaatggttccggtggcaaaaactcgtgctttgtatgcacccgacaaccgttttcagaatgggtgacgtgcgacaacgaaattgcgggaaaccaccccaaacatgagtttaggacctaaagtagtggattgggcatgttcgttgcgaaaaacgaaaaaatggttccggtggcaaaaactcgtgctttgtatgcacccgacacccgttttcggaatgggtgacgtgcgacaacaaatttgcgagaaaccaccccaaatatgagttttggacctaaagtattggattgggcatgttcgttgcgaaaaacgaagaaatggttctggtggcaaaaacttgtgtttttatgcacccgacaaccgtgttcagaaagggtgacgtgcgacaacgaaattgcgcgaaaccaccccaaacatgagttttggacctaaagtagtggattgggcatgttcattgcgaaaaacgaagaaatggttccggtggcaaaatctcgtgcttcgtatgcggggtgacaaccgttttcacaatgggtgacgtgcggcaacgaaattgtacgaaaccacctcaaataagagttttggacctaaagtagtggattgggcatgttcgttgcgaaaaacgaagaaatgattccggtggcaaaaacacgtgctttgtatgcacccgacacccgtttttggaatgggtgacgtgcgacaacgaaattgtgcgaaagcaccccaaacaagagttttggacctaaagtagtggattgggcatgttcgttgcaaaaacgaagaaatggttccggtggcaaaaactcgtgcttttatgcaccccgatacccgtttttggaatgggagacgtgcgacaacgaaattgcgcgaaaccacctcaaacatgagttttggacctaaagtagtggattgggcatgttcgttgcgaaaaacgaagaaatggttccggtgacaaaacctcgtgcttatgcaccccgacacccgttttcggaatgggtgacgtgcgacaacaaaattgcgtgaaaccaccccaaacatgagttttggacctaaagtagtggattggacatgtttgttgcgaaaacgaagaaatggttccgatggcaaaaactcgtgctttgtatgcacccctcgacaaccgttttcagaatgggtgacgtgcggtaacgaaattgcgcgaaaccaccccaaacatgagttttggacctaaagtagtggattgggcatgttagttgcgaaaaacaaagaaatggtttcggtggcaaaaaactcgtgctttgtatgcacccgacacccgttttcggaatgggtgacgtgcgacaacaaaattacgcgaaaccaccccaaacatgagatttggacctaaagtagtggattgagcatgttcgttgcgaaaaacgaagaaatggttccggtggcaaaaactcgtgctttgtatgcatcccgacacccgttttcggaatgggtgacgtgcgacaacgaaattgcgcgaaaccaccccaaacatgagttttggacctaaagtagtggattgggcatgttcgttgagacaaacaaagaaatggttccggtggaaaaactcgtgctttgtatgcatcccgacacccgttttcggaatgggtgacgtgcgacaacgaaattgcgagaaaccaccccaaacatgagttttggatctaagtagtggatggggcatgttcattgcgaaaaacaaagaaatggttccggtggaaaaaactcatgtttttatgcacccgacacccgttttcggaatgggtgacgtgcgacaacgaaattgcgcgaaaccaccccaaacatgagttttggacctaatgtagtggattgggcatgttcgttgcgaaaaatgaagaaatggttccggtggcaaaaactcgtgctttgtatgcacccgacaaccgttttcggaatgggtgacgtgcgacaacgaaattgcgcgaaaccaccccaaacatgagttttggacctaaagtagtggattgggcatgttcgttgcgaaaaaggaagaaatggttccggtggcaaaatctcgtgctttgtatgcggggtgacaaccgttttcataatggg

SEQ ID NO: 663 - DNA, 8612 bp, Zea mays
  source (0)...(0): Zea mays BAC clone full insert sequence contig bacm.pk044.a19.fis12
gatcacagtgcacaagagctaaaaaatgagtgagcaagagtggttggccagaaagcgtgcaaaataagtttgcggtatggccgtatttatacgcttgatgcgttgaaagttgaaagaccccacttgtcattgaatgttgctattctagcaaagggaaggtgttttttcggaccttcggcataaagccttcgttcatatcgcaatctgaatttattatttcaaacaaattaatattgcgaggggctactgttggggaccttcggcgtccgaaggtcctcaaaaacatgatttaatagtgtttctggtgtataatgtgcaaacaggtatcttcggactcgaatcggtatcacagagggagaagctcaaagcatacgaaggttgatacagcaccgaagctgtgagcagaaaagcttcggcatggtggcaggaaaggaaaccgacttaaagatgaaaaggctattcggacctcgatggattactatagagttattgtcagatgtaaagggcataaatgtaattttgtaagggctgtgtcccgtgtctataaataggtgaacagtatccccgtactgttcacgctgacttggcatttgcttttgcgtcacgcttgtactttttaccttctctcaggaccgaaggtacatttgtaatttgaaatcatttctatttttccatgttaataaaatagaaatgattctatgatgatgcttatattatatttcatgctttatatgaatccttcgtcattacttgttatgtttacgaaggtatgtctcttatgaccttcgtccgaaactcattatttcccgaagggacataatgcttcgaaggacgaaggactttaacacttaacactttttatgttgccttgttcttaactcttagcatttgagaacaagtccccaacagtcacccattcctaaaacgggtgtcgggtgcatacaaagcacgagtttttgccaccggaaccatttcttcgtttttcgcaacgaacatgcccaatccactactttaggtccaaaactcatgtttggggtagtttcgcgcaatttcgttgtcgcacgtcacccattctgaaaacggttgtcgtggtgcatacaaagcacgagtttttgccaccggaaccatttcttcgtttttcgcaacgaacatgcccaatccactactttaggtccaaaactcatgtttggggtggtttcgcgcaattttgttgtcgcacgtcacccattccgaaaacgggtgtcggggtgcatacaaagcacgagttttttgccaccgaaaccatttcttcgtttttcgcaactaacatgcccaatccactactttaggtccaaaactcatgtttggggtggtttcgcgcaatttcgttaccgcacgtcacccattctgaaaacggttgtcgaggggtgcatacaaagcacgagtttttgccatcagaaccatttcttcgttttcgcaacgaacatgcccaatccactactttaggtccaaaactcatgtttggggtggtttcacgcaattttgttgtcgcacgtcacccattccgaaaacgggtgtcggggtgcataagcacgaggttttgtcaccggaaccatttcttcgtttttcgcaacgaacatgcccaatccactactttaggtccaaaactcatgtttgaggtggtttcgcgcaatttcgttgtcgcacgtctcccattccaaaaacgggtatcggggtgcataaaagcacgagtttttgccaccggaaccatttcttcgtttttgcaacgaacatgcccaatccactactttatgtccaaaactcttgtttggggtgctttcgcacaatttcgttgtcgcacgtcacccattccaaaaaagggtgtcgggtgcatacaaagcacgtgtttttgccaccggaaccatttcttcgtttttcgcaacgaacatgcccaatccacaactttaggtccaaaactcttgtttgaggtggtttcgcacaatttcgttgccgcacgtcacccattatgaaaacggttgtcaccccgcatacaaagcatgagtttttgccaccggaaccatttcttcctttttcgcaacgaacatgcccaatccactactttaggtccaaaactcatgtttggggtggtttcgcgcaatttcgttgtcgcacgtcacccattctgaaaacggttgtcgggtgcatacaaagcacgagattttgccaccggaaccatttcttcatttttcgcaacgaacatgcccaatccactactttaggtccaaatctcatgtttggggtggtttcgcgcaatttcgttgtcgcacgtcacccattctgaaaacggttgtcgggagcatacaaagcacgagtttttgccaccggaaccatttcttcgtttttcgcaacgaacatgcccaatccactacattaggtccaaaactcatgtttggggtggtttcacgcaatttcgttgccgcacgtcacccattccgaaaacgggtgtcgggtgcatacaaagcacgagtttttccaccggaaccatttctttgtttttcgcaacgaacatgcccaatccactactttaggtccaaaactcatgtttggggtggtttcacgcaattttgttgtcgcacgtcgcccattccgaaaacgggtgtcggggtgcataagcacgagtttttgtcaccggaaccatttcttcgtttttcgcaacgaacatgcccaatccactactttaggtccataagtcatgtttgaggtggtttcgcgcaatttcgttgtcgcacgtcacccattccaaaaacgggtatcggggtgcataaaagcaggagtttttgccaccggaaccatttcttcgtttttgcaacgaacatgcccagtccactactttaggtccaaaactcttgtttggggtgctttcgcacaatttcgttgtcgcacgtcacccattccaaaaacgggtgtcgggtgcatacaaagcacgtgtttttgccaccggaatcatttcttcgtttttcgcaacgaacatgcccaatccactactttaggtccaaaactcttgtttgaggtggtttcgtacaattttgttgccgcacgtcacccattgtgaaaacggttgtcacccctcatacaaagcacgagattttgccaccggaaccatttcttcgtttttcgcaatgaacatgcccaatccactactttaggtccaaaactcatgtttggggtggtttcgcgcaatttcgttgtcgcacgtcacccattctgaacacggttatcgggtgcatacaaagcacgagtttttgccaccggaaccatttcttcgtttttcgcaacgaacatgcccaatcagtaggtccaaaactcatgtttggggtggtttcgcgcaatttcgttgccgcacgtcacccattccgaaaacgggtgtcgggtgcataaaaacatgagttttttccaccggaaccatttctttgtttttcgcaatgaacatgccccatccactacttagatccaaaactcatgtttggggtggtttctcgcaatttcgttgtcgcacatcacccattccgaaaacgggtgtcgggatgcatacaaagcacgagttttcccaccggaaccatatctttgtttttctcaacgaacatgcccaatccactactttaggtccaaaactcatgtttggggtggtttcgcgcaatttcgttgtcgcacgtcacccattccgaaaacgggtgtcgggatgcatacaaagcacgagtttttgccaccggaaccatttcttcgtttttcgcaacgaacatgctcaatccactactttaggtccaaatctcatgtttggggtggtttcgcgcaattttgttgtcgcacgtcacccattccgaaaacgggtgtcgggtgcatacaaagcacgagtttttgccaccggaaccatttcttcctttttcgcaactaacatgccctatccactactttaggtccaaaattcatgtttggggtggttttgcgcaatttcgttaccgcacgtcacccattctgaaaacggttgtcgaggggtgcatacaaagcacgagtttttgccaccggaaccatttcttcgtttttcgcaatgaacatgcccaatccactactttaggtccaaaactcatgtttggggtggtttcgcgcaattttgttgtcgcacgtcacccattccgaaaacgggtgtcgggtgcatacaaagcacgagtttttgccaccggaaccatttcttcgtttttcgcaacgaacatgcccaatccactactttaggtccaaaactcatgtttggggtagtttcgcgcaatttcgttgtcgcacgtcacccattctgaaaacggttgtcgtggtgcataaaaagcacgagtttttgcccccggaaccatttttttgtttttggcaaggaacatgcccaatccactactttaggtccaaaactcatgtttggggtggtttcgcgcaattttgttgtcgcacgtcacccattccgaaaacgggtgtcggggtgcatacaaagcacgagttttttgccaccgaaaccatttcttcgtttttcgcaactaacatgcccaatccactactttaggtccaaaactcatgtttggggtggtttcgcgcaatttcgttaccgcacgtcacccattctgaaaacggttgtcgaggggtgcatacaaagcacgagtttttgccatcggaaccatttcttcgttttcgcaacaaacatgcccaatccactactttaggtccaaaactcatgtttggggtggtttcacgcaattttgttgtcgcacgtcacccattccgaaaacgggtgtcgggtgcataagcacgaggttttgtcaccggaaccatttcttcgtttttcgcaacgaacatgcccaatccactactttaggtccaaaactcatgtttgaggtggtttcgcgcaatttcgttgtcgcacgtctcccattccaaaaacgggtatcagggtgcataaaagcacgagtttttgccaccggaaccatttcttcgtttttgcaacgaacatgcccaatccactactttaggtccaaaactcttgtttggggtgctttcgcacaatttcgttgtcgcacgtcacccattccaaaaaccgggtgtcgggtgcatacaaagcacatgtttttgccaccggaatcatttcttcgtttttcgcaacgaacatgcccaatccactactttaggtccaaaactcttgtttgaggtggtttcgtacaatttctttgccgcacgtcacccattgtgaaaacggttgtcaccccgcatacaaagcacgagattttgccaccggaaccatttcttcgtttttcgcaatgaacatgcccaatccactactttaggtccaaaactcatgtttggggtggtttcgcgcaatttcgttgtcgcacgtcacccattctgaacacggttgtcgggtgcatacaaagcacgagtttttgccaccggaaccatttcttcgtttttcgcaacgaacatgcccaatcagtaggtccaaaactcatgtttggggtggtttcgcgcaatttcgttgccccacgtcacccattccgaaaacgggtgtggggtgcataaaaacatgagttttttccaccggaaccatttctttgtttttcgcaatgaacatgccccatccactacttagatccaaaactcatgtttggggtggtttctcgcaatttcgttgtcgcacgtcacccattccgaaaacgggtgtcgggatgcatacaaagcacgagtttttgcccccagaaccatttctttgtttttctcaacgaacatgcccaatccactactttaggtccaaaactcatgtttggggtggtttcgcgcaatttcgttgtcgcacgtcacccattccgaaaacgggtgtcgggatgcatacaaagcacgagtttttgccaccggaaccatttcttcgtttttcgcaacgaacatgctcaatccactactttaggtccaaatctcatgtttggggtggtttcgcgtaattttgttgtcgcacgtcacccattccgaaaacgggtgtcgggtgcatacaaagcacgagttttttgccaccgaaaccatttctttgtttttcgcaactaacatgcccaatccactactttaggtccaaaactcgtgtttggggtggtttcgcgcaatttcgttaccgcacgtcacccattctgaaaacggttgtcgaggggtgcatacaaagcacgagtttttgtcatcggaaccatttcttcgttttcgcaacaaacatgtccaatccactactttaggtccaaaactcatgtttggggtggtttcacgcaattttgttgtcgcacgtcacccattccgaaaacgggtgtcggggtgcataagcacgaggttttgccaccggaaccttttcttcgtttttcgcaacgaacatgcccaatccactactttaggtccaaaactcatgtttgaggtggtttcgcgcaatttcgttgtcgcacgtctcccattccaaaaacgggtatcggggtgcataaaagcacgagtttttgccaccggaaccatttcttcgtttttgcaacgaacatgcccaatccactactttaggtccaaaactcttgtttggggtgctttcgcacaatttcgttgtcgcacgtcacccattccaaaaacgggtgtcgggtgcatacaaagcacgtgtttttgccaccggaatcatttcttcgtttttcgcaacgaacatgcccaatccactactttaggtccaaaactcttgtttgaggtggtttcgtacaatttcgttgccgcacgtcacccattgtgaaaacggttgtcaccccgcatacaaagcacgagattttgccaccggaaccatttcttcgtttttcgcaatgaacatgcccaatccactactttaggtccaaaactcatgtttggggtggtttcgcgcaatttcgttgtcgcacgtcacccattctgaacacggttgtcgggtgcatacaaagcacgagtttttgccaccggaaccatttcttcgtttttcgcaaagaacatgcccaatccactacttttggtccaaaattcatgtttggggtggtttcacgcaatttcgttgtcgcacgtcacctattccgaaaacgggtgtccggtgcatacaaagcacgaatttttgccaccggaaccatttcttcgtttttcgcaacgaacatgcccaatccactactttaggtccaaaactcatatttggggtggtttcccgcaatttcattgtcgcacgtcacccattccgaaaacgggtgtcgggtgcatacaaagcacgagtttttgccaccggaaccatttcttcgtttttcgcaacaaacatgcccattccactactttaggtccaaaactcatgtttggggtggtttcacgcaatttcgttgccgcacgtcacccattccgaaaacgggtgtcgggtgcataaaaccacaagtttttgccaccggaaccatttcttcgtttttcacaacgaacatgcccaatccgctactttaggtccaaaactcatgtttggggtggtttcgctcaatttctttgtcgcacgtcactcattccgaaaatgggtgtcgggtgcataaaagcacgagtttttgccaccggaaccatttcttcgtttttcacaacgaacatgcccaatccactactttaggtccaaaactcatgtttgggttggtttcgcgcaatttcgttgtcgcacgtcacccattccgaaaacgggtgtcgggtgcatacaacgcacgagtttttgccaccggaaccatttcttcgtttttcgcaacgaacatgcccaatccactactttaggtccaaaactcatgtttggggtggtttctcgcaatttcgttgccgcacgtcacccattccgaaaacgggtgtcgggtgcataaaagcacaagattttgccaccagaaccatttcttcgtttttcgcaacgaacatgcccaatccactactttaggtccaaaactcatgtttggggtggtttcgcgcaatttcgttgccgcacgtcacccattccgaaaacgggtgtcgggtgcatacaaagcacgagtttttgccaccagaaccatttcttcgtttttcgcaacgaacatgcccaatccacaactttaggtccaaaactcttgtttgaggtggtttcgcacaatttcgttgccgcacgtcacccattatgaaaacggttgtcaccccgcatacaaagcacgagattttgccaccggaaccatttcttcctttttcgcaacgaacatgcccaatccactactttaggtccaaaactcatgtttggggtggtttcgcgcaatttcgttgtcgcacgtcacccattctgaaaacggttgtcgggtgcatacaaagcacgagtttttgccaccggaaccatttcttcatttttcgcaacgaacatgcccaatccactacattaggtccaaaactcatgtttggggtggtttcgcgcaatttcgttgtcgcacgtcacccattccgaaaacgggtgtcgggtgcataaaaacatgagttttttccaccggaaccatttctttgtttttcgcaatgaacatgccccatccactacttagatccaaaactca

SEQ ID NO: 664 - DNA, 839 bp, Zea mays
  source (0)...(0): Zea mays BAC clone full insert sequence contig bacb.pk155.h15.fis1
  misc_feature (1)...(839): n = A,T,C or G
gccatgcgcattnnnnnnnnnnnnnnnnnnnnnnnnnnnnnnnnnnnnnnnnnnnnnnnnnnnnnnnnnnnnnnnnnnnnnnnnnnnnnnnnnnnnnnnnngttgctcctcctgctgagaaaaatttcaaaaaaatcatacaaaaaagaaaaacaaaatcacctgtgattcctactagtgcctttttagcctcgatagtacaatatttactgtactgccattctgctagttccatccgtacttcgacttgtggccagcaatatagtttcgtgttttgcactataattcaactttacattattgtttgatcgtgctaattcttgacttgagtgcagcctacccaaaactccacatatttctacgacgagaaggtttctgtttctccaggcaatcgctcatccaatctttcaccggttccacctgttggttgcagttcactactgtggcttggtaagaacggataagaatttgataacagcatttcattgagcgagttgtcaccaccatttccctgttgtcgtcggtttttctccttttggtattttggtgtttgcgctaactatggcaggagcacacgacacggtggatgcccagttgctggaagtaagggaacaagttgatggacttgctgctgacattaagatgatgcatgaacggcttgattcgacggtcacttcgacgaccgagcgtttcaaccagcttgaccttgctcaaacagcgactcgcaccacagtcgacaccttcctggcacgccttgatgcattgaccacaacatagaacaggactacggcggtaacactaagggggagatggatatcccccagggttttgcacgacgt

SEQ ID NO: 665 - DNA, 855 bp, Zea mays
  source (0)...(0): Zea mays BAC clone full insert sequence contig bacb.pk155.h15.fis2
  misc_feature (1)...(855): n = A,T,C or G
gccgatcggccattaggnnnnnnnnnnnnnnnnnnnnnnnnnnnnnnnnnnnnnnnnnnnnnnnnnnnnnnnnnnnnnnnnnnnnnnnnnnnnnnnnnnnnnnnnaggtgattttaaacaaggtggcgcgaactcgaaactctagcggtaagaaaactttagaccagcaactcgacccaaatgcagcaaccatgaattcaacaagtcgaaaactaagtagtaaagcaaaggctcaaactgttttaggtgaatttctgctctaaatatatctttgggcaaaagtggactgtaggtaaataaaacaaggaagattgagatctctcaccgagcaacctgaaatttgataccacttgataaacccaacgggtagaagggtgttcgatctttcgatgagagatgatggaggtggaaaacttgttggagaacgacgttggctgcccgactaccacaaccaagatggtgtggcgccttgagcgacaggtacaccgtctcctggtaactacgatttggggtggaggtcgacgttgtgctatccgactacaacaaccacaagggtgttgcgccttagcgatagttacatcggctcctgttgttgccactcttgtcgtgccaagaacagccttgaacctgcaagcaatcgagaacaagcaagaacaagataaaaagcagacactcacagatctgatagagttggggttctgtttcaagtatccgggtggtctagccgacacacgcgtttacaaggaagtagcaaaggctaaacatacatcaaacaaaaacccaagttctttggtggctgctagttgcttaaatagaggaatagaaaggagttctaatggagaacgaaactctctc

SEQ ID NO: 666 - DNA, 846 bp, Zea mays
  source (0)...(0): Zea mays BAC clone full insert sequence contig bacb.pk155.h15.fis3
  misc_feature (1)...(846): n = A,T,C or G
aggatnnnnnnnnnnnnnnnnnnnnnnnnnnnnnnnnnnnnnnnnnnnnnnnnnnnnnnnnnnnnnnggaaagtacaacatgagtacatctacaccagcagcaccttctccagcccaggcaccatcttccccagtccaggcgccacccttccacttgggccagtgactcaggctcgtgcaagagaattgaactacatcatgttgttaaagaacgaaggcccagaagattagaagatggtccaataggaaggcccggatggggcgcctaggtaagtcgtgaacagtaaacgtggtactgtagcgtcgacctactgttcacgcctctcctctatttagtcagagtcctgtttcatttagaacttgagttttgttttacatctagctttagctaccccagaacacacacaaatacgtgttgtcctctgtgattcagaactccacctcgagagatattaagattgctcgcatctttttcttgttcgttcttcgattgcgcacaggaaacgatcttcgtgatcaggccgatctcgcataagcaaggtcggtaaccattgggagttggttcagcgattgcattggcgcttcgggttcgctcgtcgtagtcggatcgtgagggtctacttccaccaaatcggaattatctccactcaccgaaagatcgggcactctagctctatcactttcaatatatgcaatctataattcctatcattagcaagaaattatctctcctctcctttagctaaaagtcgccaaagattgtcaacagtgacactacgattatactcctcgcaaaaacataaaataacactcctacataaatgttgcaagcattttaacgtcgtg

SEQ ID NO: 667 - DNA, 1020 bp, Zea mays
  source (0)...(0): Zea mays BAC clone full insert sequence contig bacb.pk155.h15.fis4
gttgcattctcctgaaaggatcgttttcctactttgcgccgttctaaattgatgctcgtgctgctggtccttttaaggtactaaccaagattaatgataatgcttatatccttgacatgcctgcggagtttggtgtttccactagttttaatgttgcagatttgaaaccgtatgcgggagaagatgaggagttgccatcgaggacgacttcagttcaagaaggggaggatgatgcggacatcaacaccaacacgagcacatctacaccagcagcaccttctccagcccaggcgccaccccttccacctgggccagtgactcgggcccgtgcaagagaattgaactacatcatgttgttaaagaacgaaggcccggaagaatagacgaccagcccaattgcggcccataatggacgacctagggttggtcgcgcctaggggctgcgccccctctctatttattcaggagttgcgcctcctttaatttctgagttttgttttacgttagccttagctactctcgaacacgcgcaaatctgcgctgtcttcgtgtattcataactccaccctcgagtaatagattagattgctcgcagcgtgtgcttgttcgttcttcgattgcgcacaggaaacgatcttcgtgatcaggccgatcgcgcgtcagcaaggtcggtaaccacagggagttggttcagcgattgcattggcgcctcgggcttgctcgttgtagtcggatcgcaagggtcatcttccgccaaatcggaattatctctactcgccgaaagatcgggcacctcagctacatcactttgtatgcaccccaacacctgttttcggaatgggtgacgtgcgacaacgaaattgcacgaaatcatcccaaaaaagagttttggacctaaagttgtggttggtacatgttccttgcaaaaaatgaaagaaagggtttcatggccaaagctcctgcttggtagccacccaacacccgttttcggagtgggtgacgtgaaggcacgaaattgcg

SEQ ID NO: 668 - DNA, 122 bp, Zea mays
  source (0)...(0): Zea mays BAC clone full insert sequence contig bacb.pk155.h15.fis5
caccgtccggagcttcgagagccccgaggaggtggtggtagtgtgggacaacggcacagctgccaactaccgctgctccggggcttacgacctccgcatcctggacagcgcgcccaccggta

SEQ ID NO: 669 - DNA, 1111 bp, Zea mays
  source (0)...(0): Zea mays BAC clone full insert sequence contig bacb.pk155.h15.fis6
cttgcaggctcgagtgccctagtggccagggtgtcacgctccacaagatcgtgacagccataggaggtggtgtatcggttgctaaggcgcagcgtctttggaaggctgtagtcgggccgtgaacgtcgtctcctcccccaatcgagttattccacaccctctcatcgaaagatcgggcaatcacccaacgggtgcacatcacaaaccgtgccccgtaccttacgaatccggatgagatgaaggagatccagcgccaggtgcaggcattgcttgataaaggttagattcgtgaatctcttagtccttgctcagttccagttttacttgttccaaagaaagatgggtcatggcgtatgtgtgtcgactgtcgcgctattaataacatcacaattcgttatcgatatcctataccatgccttgatgatatgctagatgagcatagtagtgccattatttttactaagattgatttgtgtagtgggtaccatcagattcgaatgaaactgggtgatgaatggaaaacaacttttaaaacgaagtttaggttatatgaatggttggttatgccgtttggattgagtaatgctccaagcacctttatgcgtttgatgaacaaagttctaaggaccttcataggattgtttgtcgttgtctattttgatgatatccttatttacaacaagactatggaagagcatttcaaacatttgagtgttgtttttgatgcgttgtgtactgcccgcttgatgaagacatccacactactgatgcatctataccaatacaagtaccaatttctggtcccattactcgcgctcgtgctcgtcaactcaaccatcaggtgattacactcttgagttcatgtccatcatatttagaccatggagacccgtgcactcttgttttgcttaggaatcagggagaagaccgaaagggaaaaggatttgaacatgctggattcggactgcagaagaacaccaacttgtgacggtcaccacggtcagatgcgggctcggattggaatgttcaagcacaacatggaaagcttatcaagtctactttcatatggatcgggaattatagtcatatctgttctgaggccgccgttagc

SEQ ID NO: 670 - DNA, 1270 bp, Zea mays
  source (0)...(0): Zea mays BAC clone full insert sequence contig bacb.pk155.h15.fis7
  misc_feature (1)...(1270): n = A,T,C or G
agccgttctcctgaacgcgcctgagcaccagaaaatgaaggaggtaagcgagggcatagcgtcattgtttcgcctcatgccggagcaggtaggaccgctgatgacgatggttacatcgatgctgggggttatatgagaggcacaagaaaagaaaaagcccttgaagcggtaacttcaaaggcccttatcacactgtgttacggcaagtaacgggagtaagtatgtcaaacaccgctgaaataatcaatttcccaaataaaaccgaacaaccgggaggtcgtatggccgacctgtcgaacgggtataccaaggtcgctaacgagatccaacagcttaagcctcgcctgagactgtcaggccgggaatggcaatgttttgaggcggtgatctggcttacctacggctggaacaagaaacaggaccgcgtgacaaatacggttattgccgagcttacgggcctgagcgatacgcatgtatcggacgcgcttaagtctctcgcagaacgcaaaatcatcttttcacagaagcagggcatgatgaaaatcgtcggtgtaaacactgacctttcagcatggattttagacaaaccggaaacgggaagaaaattcccgaaaacgggaaaatccttcccgaaatcaggaataaccttcccgaaaacggtagacacccaatacaagaacaagaacagtattnnnnnnnnnnnnnnnnnnnnnnnnnnnnnnnnnnnnnnngcacgtctgaagaaatttttatcaactcatcctgaagctgcggtctacacaccatccggtgcgaagtggggctctgctgaagacctcgagacagctaagtggatttcctccagggtgaagctgattaacccaacctgcaaagccccggacatgacctcctggtctaacactgttcgcctgatgcgccagatagacaaccggtcgcaccaggacatctgcgcgctgtatgactgggctagcaaacaccacttctggcagaccaacatcctgagtcccgaaagcctgcgtaagcagtgggacaagctgacaatgcagcgtaacgccggaggtgagcagcgcgctgtcaagccagatctggacttcaacaacactgactgggcctatggggtgatccgatgaaatctcttgcagagcagatgcgtaaccacgaccgcgagcagatgagccgcatggcccataacctgccagagcagtaccaggagtgcgcgccggtcgagcaggtggcgcaggtattcaacaagctgttcaacggccttcgg

SEQ ID NO: 671 - DNA, 1265 bp, Zea mays
  source (0)...(0): Zea mays BAC clone full insert sequence contig bacb.pk155.h15.fis8
ggatgtataattattttctgaccttaaaaaatgaaagaataatgattcgaatgaccatgatgcaagctatcagtatcatattgccaaggtcgaccaagtaacaaagagcatgctttcatgggaataacatcacaatcaacaaaatcagaataagcacccatggagaaaggaacacgcacggaatgcgtgatttttattttaacaccatcattaagccattgaatgtgatatgggtttggatgcttacgagtgggtaacgacaacttttcgaccaacatggtactcgccaaattgttgcaactgccgctgtcgataatgatgcgaattgaccgctcctgcacaacaccctttgtatggaacaaaaagtgtcgctgattcttctcgggcaaagcgacctgtgtactaagaacacgctgcacaacaagactttcatacctatcagcgtcgcccgggttgacatgtacctccgcctgagctgcagggttagtggcaagtagtgcatgttcaatttctttagaatcactagcggaagagtactcaccatcgtcacgaatgagcaaagtgcgcttgtttgggcagtctcgaatcacatggccaaatcctctacatcgataacactgaatatcccgtgtacgacctgtgggtggggcagtgctggctggtttggtcgtcttctcgcgtggagtagtggtggacgtggatggcgcagggggaactggtgctgagatggatgtcgagcttcgtcctgcaaaagggttagaatatgtcttcgagcggcgtccctgcacttcacgttcagctttgcaagcatattcaaataaagtagtcatatcataatattccttataatcaagtatatcctggatttcgcggtttaaaccaccacaaaaatgtgccatagcagcgtcgttgtcctccaatatcccacacgaatcatacctttttgtaactcctggaaatagcctcaacagattgagaaccttgctgaaaacgctgcattttattaagcaaatcacgagcataatacgaaggcacaaatcgatgtcgcattgcagctttcaactgatcccaagtggttggaatggcaatgggatgtttcattttatactcacgccaccaaattaaagcaaaatcagtaaattcactaatagcaactttaacctgagaatgtgcagcaatatcatggcatgtaaatttttgttcaacctctaactcccaatcaagatatgcagcacgatcatatttgccattaaaagtgggaaatc

SEQ ID NO: 672 - DNA, 971 bp, Zea mays
  source (0)...(0): Zea mays BAC clone full insert sequence contig bacb.pk155.h15.fis9
ccgaaactgaatttttaaggctttgtgccttcataggtggccagtccaagactgccctctcccatttgaaagctcgtttcactactacagtaaacctctgtacaggcggtgcaccacaagcggttcctggaaccgcctgtgtagaggctatacaacatctcatgatagccgagccttacatagaggaacacctggatgagcttcgtaaagaaaatcagaaccgcacaggggactggatcatgagggagcacaaacatcgtttcagcgaatgcttaatggacaaaaacatcccattcggagactctttggaagagaaaacaatgaagaatttggcttctgggccatcgtgttttgtgacatcatggcaagcatatgacatcaatgggtacacattctacactaaatcaaaagacatgaaaagtgttgcacaaaatagcgatgttcgtatcgatgcttttgacctacatggacagaagaccacatattttggattcatagaggaaatatgggaacttgattatggcccaagcatgaaaatacctttatttaagtgccaatgggtacaacatcccgtgggggtgatagtggataactacggactcacactggtagacttaaagaaagtaggatataaagatgacctgtgggttctcgccgaatgtgttgcacaagtgttctatgtactcgatccagcagatgagaagatgcatgtagttatttctggaaagcaaaaaattgttggagttgagaatgtgggagacgaagatgaggaatacaataagtatgaagagatgttcgtctttaacggtccagagagaatcaagcgtgtgggaaaagaaaattgataagaactgatgaggacatcaccatcattgatacaaccataccagtgaccacttcaccattcgtagctaatcaaggaccaatgacacgagcccgtgcacgtaaacttaattatcacgtgaactcgg

SEQ ID NO: 673 - DNA, 1991 bp, Zea mays
  source (0)...(0): Zea mays BAC clone full insert sequence contig bacb.pk155.h15.fis10
tcgactcattgcaatctactacaaaggatgtgcccatttcagatggtaatatggtttgttacttcgtgctcctattgatttaatgcctgtgccatctcctgaaaaactaaattttgatgctactagggcgtgctgaattgatgttaaaactgcacgaaactactaaagaaaacatagagcgtatgaatgctagatataagtttgctagtgataaaggtagaaaggaaataaattttgaacctggagatttagtttggttgcatttgagaaaggaaaggtttcctgaattacgaaaatctaaattgttgcctcgagccgatggaccgtttaaagtgctagagaaaattaacgacaatgcatataggctagatctgcctgcagactttggggttagccccacatttaacattgcagatttaaagccctacttgggagaggaagttgagcttgagtcgaggacgactcaaatgcaagaaggggagaatgatgaagacatccacactactgatgcatctataccaatacaagtaccaatttctggtcccattactcgcgctcgtgctcgtcaactcaaccatcaggtgattacactcttgagtttatgtccatcatatttagaccatggagacccgtgcactcttgttttgcttaggaatcagggagaagaccgaaagggaaaaggatttgaacatgctggattcggactgcagaagaacaccaacttgtgacggtcaccacggtcagatgcgggctcggattggaatgttcaagcacaacatggaaagcttatcaagtctactttcatatggatccggaattatagtcatatctgttctgaggccgccgtaatcattgttttcttaccgagacatttcctgccttttctgcccatggtgctgcgtcaccctattttggcccaatgggtcgtgtatcaagttaggtccattagggacgcatcctagggttgcagcacgactccaatacccttgtggtcgtcctcccatgtttataaaccccctagccgccaccaagaacagcgggttttgtttagatcaagtttagctctcgctacttgcttgcaagcgcgcgtgctagttcagccgcccgtcttcttgtcttcggaaccccaccatattggagtttgatctttaaacctacatttagatctggtaattcagtacttgttctacttgttcttgctagttcttcgattgcttgcaggacgagtgccctagtggcccagggtgtcacgctccacaagatcgtgacagccataggaggtggtgtatcggttgctaaggcgcagcgtctttggaaggctgtagtcgggccgtgaacgtcgtctcctcccccaatcgagttattccacaccctctcatcgaaagatcgggcaatcacccaacgggtgcacatcaccgcttatttggtaacatggacaaatacatcttttgcacacaacgtgtctcgtttcttggttatgttgttactccacagggcatagaggtggatagtagcaagattgctgccaatcgggactagcctacatcgacgatggtaacacagatttagagttttcttggacttgcaggcttctaccgcaggttcatccgtgattttagttccattgcagcccctctacatgagcttacaaagaaaggtgtgccgtttgcttgggacgactcacaggaggtagtgttcaacactttgaaagataagttaacacatgttcccctcttgcagttgcctgattttaataaagtgtttgagcttgaatgtgatgctagcggtattggactaggtgctgttttgttgcaagatggaaagccggttgcttattttagtgaaaaattaagcggtgctagcctgagatattctacttatgataaggagctttatgctttagttcgcactttgcaaacatggcagcactatctttggcatcgcgagtttataatttattctgatcatgaggctttgaaacatattcgtaa

SEQ ID NO: 674 - DNA, 1790 bp, Zea mays
  source (0)...(0): Zea mays BAC clone full insert sequence contig bacb.pk155.h15.fis11
caaaactctaataaataaaggaggcgcagctcctggataaatagagaggtggcgcagcccctaggggcggccaaccctaggtcatccattatgggccgcagttgggctggtcgtctattcttccgggccttcgttctttaacagcataatgtagttcaattctcttgcacgggcccgagtcactggcccaggtggaaggggtggcgcctggactggggaagatggtgcctgggctggagaaggtgctgctggtgtagatgtgctcgtgttggtgttgatgtcctcatcatcctccccttcttgaactgaagtcgtcctcgacggcaactccttgtcttctcccgcatacggtttcaaatctgcaacattaaaactagtggaaacaccaaactccgcaggcaggtcgagggtataagcattatcattaatcttggttagtatcttaaaaggaccagcagcacgaggcatcaatttagaacgacgcaaagtaggaaaacgatcctttctcaaatgcaaccaaaccatatcaccaggttgaaaagtaactagtttccggcctttactaccagtaatctgatatttagcattagcagcagcaatgttttgttgagtttgttcatggagattaatcatttgttcaacatgtgcaagagcatctatgtgtggggcgtccgcagcatcaagtgaaaacaaagcaataggcgccctaggaatgtaaccataaacaatttgaaaagggcatatctttgtagaagaatgggttgcatgattataagcaaactcaacatgagggcatccaccgtgtcgtgtgctcctgccatagttagcgcaaacaccaaaacacgaaaaggagaaaaaccaacgacaacagggaaatggtggtgacaactcgctcaatggaatgatgttatcaagttcttatccgttcttaccaagccacagtggtgatttgcaaccaacaggtgtaaccggtgaaagattggatgagcgattgcctggagaaacagaatccttctcgtcgtagaaatatgtggagttttgggtaggctgcactcaagtcaaagattagcacgatcaaacaataatgcaaagttgaattatagtgcaaaacacgaaactatattgctgggcacaagtgcaaaggacagatggaactagcagaatggcagtaccgtaaatattatactagcgaggccaaaaatgcactagtaggaatcacatgtgattttgtttttcttttttgtatgattttttgatatttttctcagcacaaggagcaacaaaataggagctacacgaagtttcacctaaaacagagttcagatgtggtctacagaaaatcaggaagttctctgaaaagcgtgcgagaactttgacgaatttttttctttattttcctgaattttttttgacaattttatcgaaaccaaacaggcctcagaatggtgtcaataagctcctgtaaaaatttcagattttttgaacaaccgagcgaaaagttatgcccggtttaaggaaggtatgtttaaaacgaccgagatgagacaaccgctttgtatcctttctccttcgttttcttttttttgtttctgttttttttacgtaaccgaaggagaaaaacaaggaagcggcgttgactcggtttgttttttttctgtttttttatgtaaccgaaggagaaaaataaggaagtggcgttgactcggtttatggcgtgatcaaacgaaatatggtggcggcacgctagggtttgaatggtggaataacacaatgcaaccagcaagtgtcgg

SEQ ID NO: 675 - DNA, 1781 bp, Zea mays
  source (0)...(0): Zea mays BAC clone full insert sequence contig bacb.pk155.h15.fis12
ggaacagaccgactatggatcaagttgtttagcagttatagcagctcgggcaagatcatctttaacaatttgttcaggtgtcattggatgtataattattttctgacccttaaaaatgaaagaataatgattcgaacgaccatgatgcaagctatcagtatcatattgccaaggtcgaccaagtaacaaagagcatgcttccatgggaataacatcacaatcaacaaaatcagaataagcacccatggagaaaggaacgcgtacggaacgtgtgatttttattttaccaccatcattaagccattgaatgtgatatgggtttggatgcttacgagtgggtaacgataacttttcgaccagcatggtactcgccaaattgttgcaactgccgctgtcgataatgatgcgaattgaccgctcctgcacaacaccctttgtatggaacagagtgtgtcgctgattcttctcgggcaaagcgacctgtgtactgagaacacgctgcacaacaagacttttatacatatcagcgtcgcccgggttgacatgtacctctgccttagctgcatggtcagtggcaagtagtgcatgttcaatttcttcagaatcactagcggaagagtactcaccatcgtcacgaatgagcaaagtgcgcttgtttgggcagtcccgaatcacatggccaaatcctctacaacgataacactgaatatcccgtgtacgaccagtgggtggggcagtgctggctggtttggtcgtcttctcgcgtggagtagtggtggacgtggatggcacagggggaactggtgctgaggtggatgtcgagcttcgtcctgcaaaagggttagaatatggcttcgagcggcgtccctgcacttcacgttcagctttgcaagcatattcaaataaagtagtcatatcataatattccttataatcaagtatatcttggatttcgcggtttaaactgtaacaccccaggtgttgccatggctggagcacaccttggcactcaagactatgatcacatgtggaagaacttaaggagcaaaagtataaggggctttggaaactaagtttttaccaagagttgggaatgaccaaaggcattaccctaattgtgtgcaactatcaccttgggagagggggaaagaaccctaggcctctcttaaaccctatctcccaaaaccatggataagaggggaaagagagtgagcaaatgtgcaaaacatgggtaattttcacccaaaccctaagcaacattataaccatcaattaggggagggaaatattacaaaaaggcccctagggaaaccccatttcaaatctccaagtggagagagagctagagctctctaattccctctaagtcccattttagcaacaagatgtatcatgatctcagatgcaccctggatgttcccaaggaccctgagcttagaaagaagatactggacgaagctcacctttccaaattctccatgcaccctggtagcaacaagatgtatcatgatctcagatctctatattggtggactagaatgaaaagggaaattgccaaatacatatccgaatgtgacacctgccagagaattaaggctagtcacttgaaggcagcaggccatttgcaaccccttcccataccatcttggaaatgggaggacatttgcatggacttcatagtgggattacccaatacctccaggcaccatgattctatttgggttatcgtggacagtttagccaagactgctcatttcttgcccctgcacaccccccttcgg

SEQ ID NO: 676 - DNA, 2002 bp, Zea mays
  source (0)...(0): Zea mays BAC clone full insert sequence contig bacb.pk155.h15.fis13
atccgagccctcatctgaccgtggtgaccgtcacaagttggtgttcttctgcagtccgaatccagcatgttcaaatccttttccatttcggtcttctccctggttcctaagcaaaacaagagtgcaagggtctccatggtctaaatatgatggacatgaactcaagagtgtaatcacctgatggttgagttgacgagcacgagcacgagtaatgggaccagaaattggtacttgtattggcatagatgtatcagtagtgtggatgtcttcatcagtttggaagctgggcgccggggatgaggtcgatctggtgctcaatgccacgaagcgggggaagacccgatggcaagtccgtggagaaaacatcagcgtactcctgcaaaagtttagaaacagcaaggggaatatcctaaggcgggcatcatcaagtgaaacgagcatactagaacatacaagcgcatagcagggcaagtgagtatcacgtaggtcatcaaaatcagcacgtgtagcaagtaaaacaggagcatgcaacttgatttcagcattaataggggtggatggagtaggtgcatgttgctttgcagtttttgtagcccgagcaagatcatcttttataatttggtcaggggttatgggatggatattattttctgacccttaaacaagaaagaataatgattcgaacgaccatgatgtaaactatcagtatcatactgccacggtctatcaagtaaatgaaattgcgcgaaaccaacccaaacatgtgttttggacgtaaagtagtggattgggcatgttcgttgggaaaaacgaagaaatggttacggtggcaaaaactcgtgctttgtatgcaccccgacacccgtttttggaatgaatgacgtgcggcaacgaaattgcgcgaaaccaccccaaacatgtgttttggacctaaagaagtggatggacatgttcattgcgaaaaacgaaaaaatggttcctgtggcaaaaactcgtgcttgtatgcaccccgacacccgttttcggaatgggtgatgtgcggcaacgaaattgtgcgaaaccaccccaaacatgtgttttggacctaaagtagtggattgggcatgttcgttgggaaaaacgaagaaatggttccggtggcaaaaactcgtgctttttatgcacccgacacccattttcggaatgagtgacgtgcggcaacgaaattgcgtgaaaccaccccaaacatgagttttggacctaaagtagtggattgggcatgttccttgcgaaatacgaagaaatggttccggtggcaaaaactcgtgcttgtatgcaccccgatacccgttttcggaatgggtgacgtgtggcaacgaaattgcacgaaaccaccccaaacatgagttttggacctaaagtagtggattgggcatgttcgttgcgaaaaacaaagaaatagttccattggaaaaaactcgtgctttgtatgcaccccgacacccgttttcggaatgggtgacgtgcggcaatgaaattgcgcgaaaccacccccaacatgagttttggacctaaagtagtggattgggcatgttcgttgcgaaaaacgaagaaatggttccggtggcagagacgtgtgcttgtatgcaccccgacacccattttcggaatgggtgacgtgatgccatgaaattgcgcgaaaccacccccaaacatgtgttttggacctaaagtagtggagtgggcatgttccttgcgaaaaacaaagaaatggtttcggtggcaaaaactcgtactttgtatgcaccacacccgtttttctgaatgcgtgacgtgcgacaacgaaattgcgcgaaaccaccccaacaaagaatttgtggacacaaagtaattgaattggtcatgttcgttgcgaaaaaacaaaaaatatgttacaggtgagcgaaacatcgagcttgtttgcaccccgaacacccatcttcgtatagggtaaacttgcgtaaacacaatggcgtggattctg

SEQ ID NO: 677 - DNA, 1960 bp, Zea mays
  source (0)...(0): Zea mays BAC clone full insert sequence contig bacb.pk155.h15.fis14
cctacctaattccgctgcacttcgaacaatgatggatacttttgcaaaaactccgatgatgataatggtgatgtaataatttaacattatggcatgtatggttttatgctttattgtatttgctctgtgactcaccttcgagtgagattgtggtacttgatcctgtcagtggccgtgtcggactagatccgagggattgatgggttattcccatttaagtgtggtctagcctctaaggcgggacttggacacttaagttggaataattcgggcagttccgccacagctggtatcggagcttgtaccaccacagaggaatcaataaaatgtaaataccatcaattttctaaataaaacttgatagaaacaagttggatagatagtaggacgagcaggatagacctaggacgtgaagccttaggttaatagaagggtagctaggtggctaagtaactaggccctacagaccacttttacaggatgggagttcctccctattccttctatcttgttgtgaggtcgttcaggacgagcatgcatgcattcaaaattaagcaattggataactgagtaaaagacttaaaaacaagataacaaccaactaggtccctagtgcctttttacttaactagaggagggctgagttttattttccttgttctttttacattctttttcttttacttacgcttgaccgtacacagatgacttcccacgggatcctccgatgaaggaaatgcactgacccacactgacggacttgcacgagagggttttccccgcattttatgggaagtgcttcagggagccggatacatgacaccccctcagtacgcggtgcagcagttcgagaagcaccgagtgccccgctgtagggtgaggatgactctggagcctcatcccctgcagccaggctggcgctccttggactcagagtctttcgggtaccgggcagaggacacgatcgaggcgatcgctctgcatggattgactaccttctgcgggttccatcccttggagctggctacccatcccattggcttgttccccgctgaaaaggaggacgacccaatgtggaaggatcgggtggaacatgccaaggacatctgggccatctacccaggacagactgcgcacttaacagtacggtgcatgaatgctctgtaccgtctgcaagtgatgcgcggtgaggcaatgtcccatttgatggcactgctggaggcaacaaagatcacgctggataaccgagaggagcttgtggttgacctatctcaggaaatggtagagaaagatttgcaagtggagcagctgtctggtgagattcatgagttggaggagctagtgggcacccgggagaacaccattgaggtcctagaggatcagctccttaacactcagcaacagcttgctgaggctaacgagcacctggacatgcatcaccaagagatccaggaccaggaggacgacgaggacgtcgacattgagggaggagatgagcctacctccagtgtggacactgctggctcgggaagaccaccttcccccgagtccagtgttgcttcgttcgctcgctaggtgtccaaggtaggcttagaagtcggacagtcggactcctcgcagctagcttagcttttgcacccttggggtactaggctaggtagggttgagtcattttagaacaaattgatgtaatcatgttaaactctcttgggggcttgtttgaggaatgctattatcagtttaatttggaaggaagaatttatgcctcttaaagaatcccttttgttgaagttagatctttcatgctgtttttaacttttccccgtgttgaaatcttgaaattggaactgtggtgttaagtaagcatgtggtttttcagatggctgggaggcagcgtcgtggccagaacgagcgcgttccaccaccacccccacctcccactctgcaggagctcatggct

SEQ ID NO: 678 - DNA, 1352 bp, Zea mays
  source (0)...(0): Zea mays BAC clone full insert sequence contig bacb.pk155.h15.fis15
ccgaaagttaccttcggcgccctcatcacgcccaccattgatattagcatgcatctcatcaaaccgcctcaagagtgcgacaaggctcttgtcaatatgagcaactgtcatttccacatttgcaagtttggtgttcgtgtcgatctgtgtggcctccaattgccccatcttttcattcgtcacctgcatgtcattatcaagaccttctgtgtgcgtcttcactagccttacaaagtgttgtatgatacccttggtgcgaggagagtgtggcatattacgagaagcatcatcaacctccaatcctgccatggttagacgaacagaggcaacaagaaaaaaaaacgtgaaggaataaaaactctacaactattaggatgtagctactgcaaggcgctcactctcaacctgccacacaagctcttaccaattcttaccttgcacaacaggaggggtcagcaaccaacaagtctgcaaccgtggaataagtgtatcggtgccgcagcaacacgacctgtcaaactgtagtcgaaatatgtagagttgtaggtgggctgaagcaaggaatacactagtaccacgttagttacaaaagcaagctgaataatcgttcaacggtggtactgtgctggtcctaggctaaaccaggctagagacgtgagcctaggcacaaaggtagtcactgaaaaagaacaactagcacagcacaaagagaaacaacagatttagagattcagcccccttcttcttctttttccttttttttttcttttctattcttttttttttcttcttcttctgttttttttttgcaggggcctaaaccctttttttcactatgacaacccaaacaataaagatattgctaacaacccctttaaatcagatttaacaaatcttgttaatataggaagtccagaaatctctacgatgattgcggagcgctcagaacgaattttgagataaggtcagatccgttggaaagaagataagataagctttccagattgtatttaaacttccaaatcggatatgatatgtatctgtggtggcaaaaacgaaccagagatgtttttggtgatggtggatttcgtggtgaccaaaacgtggtagaactcaaaactctaaaggaataaactaagaccagcaactcgacacaaccgatgcaaccaaaaactaaacaagccctaactaagtagtactagtaaatgctcaatggtttataggattgcggtaaaactaatctactattttttggctttttctggactataggagataagaaaacagcgaagaaaagtaaatctctcaccgataaaccttcctctgataccaactgatgtgcacccgttggg

SEQ ID NO: 679 - DNA, 2302 bp, Zea mays
  source (0)...(0): Zea mays BAC clone full insert sequence contig bacb.pk155.h15.fis16
cgaacgcctgctcgttgcacgacatgccaaaaggcgaagtctggttaaatccacacggtttgtatttgcctctacccgttcctagtgctccttgggaagatatttctatggattttgtgctgggattgcctaggactaggaagggacgtgatagtgtgtttgtggttgttgatagattttctaagatggcacatttcataccatgtcataaaactgacgatgctactcatattgctgatttgttctttcgtgaaattgttcgcttgcatggtgtgcccaacacaatcgtttctgatcgtgatgctaaatttcttagtcatttttggaggactttgtgggcaaaattggggactaagcttttattttctactacatgtcatcctcaaactgatggtcaaactgaagttgtgaatagaactttgtctactatgttaagggcagttctaaagaagaatattaagatgtgggaggactgtttgcctcatgttgaatttgcttataatcgatcattgcattctactacaaagatgtgcccatttcagattgtatatggtttgttgcctcgtgctcctattgatttaatgcctttgccatcttctgaaaaactaaattttgatgctactaggcgtgctgaattgatgttaaaactgcatgaaactactaaagaaaacatagagcgtatgaatgctagatataagtttgctagtgataaaggtagaaaggaaataaattttgaacctggagatttagtttggttgcatttgagaaaggaaaggtttcctgaattgcgaaaatctaagttgttgcctcgagccgatggacccgtttaaagtgctagagaaaattaacgacaatgcatataggctagatctgcgtgcagacttggggttagccccacatttaacattgcagatttaaagccctacttgggagaggaagttgagcttgagtcgaggacgactcaaatgcaagaaggggagaatgatgaagacatccacactactgatacatctatgccaatacaagtaccaatttctggtcccattactcgtgctcgtgctcgtcaactcaaccatcaggtgattacactcttgagttcatgtccatcatatttagaccatggagacccttgcactcttgttttgcttaggaaccagggagaagaccgaaatggaaaaggatttgaacatgctggattcggactgcagaagaacaccaacttgtgacggtcaccacggtcagatgcgggctcggattggaatgttcaagcacaacatggaaagcttatcaagtctactttcatatggatccggaattatagtcatatctgttctgaggccgccgtaatcattgttttcttaccgagacatttcctgccttttctgcccatggtgctgcgtcaccctattttggcccaatgggtcgtgtatcaagttaggtccattagggacgcatcctagggttgcagcacgaccccaatacccttgtggtcgtcctcccatgtttataaaccccctagccgccaccaagaacagcgggttttgtttagatcaagtttagctctcgctacttgcttgcaagcgcgcgtgctagttcagccgcccgtcttcttgtcttcggaaccccaccatattgtagtttgatctttaaacctacatttagatctggtaattcagtacttgttctacttgttcttgctagttcttcgattgcttgcaggacgagtgccctagtggccagggtgtcacgctccacaagatcgtgacagccataggaggtggtgtatcggttgctaaggcgcagcgtctttggaaggctgtagtcgggccgtgaacgtcgtctcctcccccaatcgagttattccacaccctctcatcgaaagatcgggcaatcacccaacgggtgcacatcaacatgtttgggggggtggtttcgcacaatttcgttgccgcacgtcaccattccgaaaacgggtgtcgggttgcatacaagcacgagtttttgccacagaaaccatttcttcgtttttcgcaacgaacatgtccaattcactactttaggaccaaaacacatgtttggagtggtttcgcgtaatttcattgccgcacgtcacccaatccaaaaatcggtgtcggggtgcatacaaagcacgagtttttgccaccggaaccatttcttcgtttttcgcagcgaacatgcccaatccactactttaggtttaaaactcatgtttggggtggtttcacgcaatttcgttgccgcacgtcacacattccgaaaatgggtgtcaaaggtgcaaaca

SEQ ID NO: 680 - DNA, 2176 bp, Zea mays
  source (0)...(0): Zea mays BAC clone full insert sequence contig bacb.pk155.h15.fis17
cccgatagcaagctcccgaggatgccatcgaggatctccccgcatccccagctattgaaggtaagccccggtttatgcataaccgtattattatatgctactttactacatttaatgcttgtaggattgtaatgttcacttaagtgtaggagttgcttgaaacctctagttgcatgaacttaagattcctttttgagatggatactagtatgctaggtcgagtagctgctatgctaatcaggatctcggtagaagtcgagtgatttttctagcactcgtgcgaggtcaggaattgattgtattcaccttgataacaggatctatgttagtctatggacttggatccagggaggatgccttgtccatgagacgggaaaaaggaattaaggattaatgtgtggatacatgagtcaagcatttgaacgtactaaacacatgtcgggaaatatggtaaccggtaaacctagtacctgagtgaagccgagcgcggactttatccctcacgcgacctaagactgggcctgccatgctagctatggtgggtacaagtgcggtcactgcacggcggcagccggggtcagtggagcattgtatgccaaggcggtgaggcctggacgcgaacggggaatcaatggggacggttgacatgtgtggggtcggagtaccctgacatgtcgtgtgtttaggtttaccttgtaaggataaaaactcgattcgaatcgtttgcttctcgcagctaaggagactgcttgacccctttactacattgagtaagaagtgaaatgaggttacatgagacaatttgttgattgaactaaatgcttgttaccatgtatgcttagaaggagcaaacttagctaagataatgatactagaatttgaaaagctaagaaatgattttagaaacagctagtgcttttggcaaaccaaacccctcagccaaacagctgcatggtctagaggtagaggagtagatttctcataccgggtaagtctagctgagtattagtatactcagccttgcttgtggcataatttttgtagttacgctttaggatatggttgatggtgtgacttggcctaccaccctgccggtggttggacggtcgagtgggatgctgctccggcagaagaggaacatgaggagtagtgggctaggctgataaacccaacaggtagaagggtgcccgatctttcgatgagagatgatggaggtggaaaacttgttggagaacgatgttggctgccggattaccacaaccaagatggtgtggcgccttgagcgacaggtacaccgtctcctgataactacgatttggggtggaggtcgatgttgtgctatccgactacaacaaccacaagggtgttgcgccttagcgatagttacaccggctcctgttgttgccgctcttgccgtgccaagaacagccttgaacctgcaagcaatagagaacaagcaagaacaagataaaaagcagacgctcatggatctgatagagttggggttctgtttcaagtacccgggtggtctagccgacacacgcgtttacaaggaagtagcaaaggctaaacttacatcaaacaaaaacccaagttctttggtggctgctagttgcttaaatagaggaatagaaaggagttctaatggagaacgaaactctctcggtagtttctggacgcctcgtttggtttctgtcattgattcttgatgcacctcaaagtagacgaagagaactttccaacaagtagttatttgcactaaacaaccttgggagtggaaagttatgctccatttaatttggtgtatgctgttacgaaattgacttgggtagagcatgagttcactcggcagtttctggacgcttagtgatgcggacatcaacaccaacacgagcacatctacaccagcagcaccttctccagcccaggcgccaccccttccacctgggccagtgacccgggcccgtgcaagagaattgaactacatcatgttgttaaagaacgaaggcccggaagaatagacgaccagcccaattgcggcccataatggacgacctagggttggccgcccctaggggctgcgccccctctctatttattcaggagctgcgcctcctttatttcctgagttttgttttacgttagccttagctactctcgaacacgcgcaaatctg

SEQ ID NO: 681 - DNA, 4164 bp, Zea mays
  source (0)...(0): Zea mays BAC clone full insert sequence contig bacb.pk155.h15.fis18
cccacatttgtgatctgctttaggtgaaacttcgtgtagctctattttgttgcttcttgtgctgagaaaaatatcaaaaaaatcatacaaaaaagaacaacaaaatcacttgtgattcgtactagtggcctcgctagtacaatatttacggtactgccattctgctagttccatccgtcctatgcacttgtggccagcaatatagtttcgtgttttgcactataattcaactttgcattattgtttgatcgtgctaatccttgacttgagtgcagcctacccaaaactccacatatttctacgacgagaaggtttctgtttctccaggcaatcgctaatccaatctttcaccggttccacctgttggttgcagttcaccactgtggcttggtaagaacggataagaacttgataacagcactagtgtgagcgccttgtgagcagtacacccctgtttttgtcgttggtttttctccttttggtgttttggtgtttgcgctaactatggcaggagcacacgacatggtggatgcccagttgcaggaagtcaggggacaagttgatggacttgctgctgacattagaacgatgcatgaacggcttgattcaacggtcacttcgacgaccgagcgtttcaaccaacttgaccttgctcaaacggcgactcgcaccacactcgacaccatcctggcacgccttgatgcattgaccacaaagatggagcaggaatacggtggtgacactgagcaggacgatggagatcgccgtggtcgtgcacgtcgtgtggttcgtcacccccctaatgacttattttctaagattaaatttaaaattccatcttttaatggtaaatatgatcctgctgcatatcttgattgggaattggaggtagaacagaaattttcatgccatgatattcctgctaatagccaagtgaaggctgccattagtgaatttactgattttgctttaatttggtggcgtgagtataaacaaaaacttcccattaacagtgtcattacttggacccaattaaaaactgccatgcgccacagatttgttccttcctattatgctcgtgatttgcttaacaaaatgcagcgttttcaacaaggttcacaatctgttgaggaatattaccaggagttgcaaaagggtatgcttcgttgtggtttggttgagtcagatgacgctgctatggcgcgttttcgtggtggtttgaacagggaaattcaggatatacttgattataaggattattttgatataaccacattgtttgaatatgcttgcaaagctaaacgtgaagtgcagggacgacgatcaaagacatatactaactcttttgcaggccggggtccaacacacagctcaactccttccagccctgcaccttctacgcctagcactacatcgcgcacagggacgaccaagccagtggcgccccctgccaaaggcgccgcttcttccacaggacgtacacgggatattcagtgccatcgttgcagagggtttgggcacatgattcgggactgcccaaacaagcgtaccttgcttatacgtgacaatggtgagtactcttcagccagtgattctgaggaaactggtcatgctatgattgccactaaccatgcagaaaatgaggaagtccacgttgatcccatcgacgccgataggtatgagagtcttgttgtgcagcgtgttctcagcacacaggttgcccaggccgaaaaaaatcagcgacacactctattccataccaagggccgtcgtgcacgaacggtcgattcgcatcatcatcgatagtggtagctgcaacaatttggcaagtacagcgttggtagagaaattatccttgcccactcgcacacatccacatccgtatcacattcaatggcttaatgatggtggtaaaataaaggtaacacgttcggtacgtgtccccttttcgctgggttcttattctgattatgctgattgcgatgttattcctatggaagcatgctctttgttattgggtcgaccttggcaatatgatactgatagtttacatcatggtcgttcaaatcattattctttcatgtttaaaggccagaaaataattatacatccaatgacccctgaccaaattttgaaagatgattttactagggctgctaaaattgcacaacaagtcaaatcgacatcagctgcacctattaaatctgaaatcaagttgcactctcctgttttacttgttacacgtgctgattttgatgatctccatgaagctcatatgccttgttatgcacttgtatgctcgtgaatggttgttccgcttgatgatgcaccgtctttggatataccccctgctgttgttaacctttcgcaggagtatgctgatgtttatcctacagacttaccaccgggtcttcctcccctccgtggcattgagcatcagatcgatctcatccccggcgcttctcttccgaaccgcgccccgtaccgtacaaatccagaggagacgaaggagatccagcgccaggtgcagacactgcttgataagggttacattcgtaagtctcttagcccttgctcggttcctgttttactcgttccaaagaaagatgggtcatggcgtatgtgcgtagattgtcgtgctattaataacatcacagttcgttatcgatatcctattccacgccttgatgatatgttagatgagcttagtggtgccgttattttctctaaggttgatttgcgtagcggttaccatcagattagaatgaaactcggtgatgaatggaaaacggcttttaaaacgaaatttggtttatatgattggttggttatgccatttggattgactaatgctcccagcacctttatgcgtttaatgaacgaagttctacgggccttcatagggttgtttgttgttatttatttcgatgatatccttatttacagcaagtctatagaggagcatttagaacatttgcgtgctgtttttgatgctttgcgtgctgctcgcttgtttggtaacatggaaaagtgcatattttgcacgcaacgtgtctcgttttttggttatgtggttactccgcagggcattgaggtggatagcagcaagattgctgccattcgggagtggcctacaccgacgacggtcacacaaattcggagctttcttggacttgccggtttctaccgcagatttgttcgtgattttagctccattgcagcgcctctacatgagcttacaaagaaagatgtgccgtttgcttggagtgattcgcaggaggtagcgttcagcactttgaaagataagttaacccaagctcccctcttgcaattgcctgattttaataaagtttttgagcttgaatgcgatgctagcggtattgggctaggtgctgttttgttacaagaaggaaaaccagttgcttattttagtgaaaaattaagcggtgctagtctgaaatattctacttatgataaggagctttacgctttagtgcgcactttgcatacatggcagcactatctttggcatcgtgagtttataatccattctgatcatgaggctttaaaacatattcgtacccaaacaaatctgaaccgtcgtcatgctaaatgggtagaattcattgagtcctttccttacattattaaacataagaacgggaaggacaatgttattgctgatgctttgtctcgtcgctataccatgctgtcacagttagattttaaaatctttggtttggacactgtgaaggatcaatatgttgacgacgctgattttaaagatgctttcggccattgtattaatgggaaaccatggggcaaatttcacatacaggatgggttcctgtttcgcgctaacaagctgtgtgttccagctagctcggttcgtcttttgttgttacaggaagcgcatggaggcggtctcatggggcattttggcgtctacaagacacatgagtgttggctgcccacttcttttggcctcggatgcgcgctgatgtggagcgccttgttgcacgctgcactacttgtcagaaagctaagtcacggttgaacaaccatggtttgtatatgcctttgcctgtccatcatctccttggcttgatatctctatggactttgttttgggcttgcctagaactaagaaggggagggatagta

SEQ ID NO: 682 - DNA, 3002 bp, Zea mays
  source (0)...(0): Zea mays BAC clone full insert sequence contig bacb.pk155.h15.fis19
caacaacctattgaaaatttcttgtgcatagaatttctatttcatctagatatgttgtttcttcactttgtgcaaataagatattggcatgttctcaagaagaaaagaatctcttgtttccatgtactttagtagaagttttaggtttatatttgaaagacattaataaaagcttagtcatcaacatcaatcatgatgcaacaccgaggacggtttgctgtcaagaaatggagaatgatgagaacataacccgcacagatatgaccatgttaatggctcctgctacaaagacattgaggaataaagaagttgattggggaccaagtaatgatatttccaacatttccaacaaagcaagcacatcatcaaatttaaagatatacttgggtgaggagcatacactagagtcgaggacgactctattacaagaaggggaggatgatgagtacatcactgccatcaatacaccacaccagctaccctcttcacgatttaatcatggaccagtgaaacgagtccgtgcacgtaaatttaattatcaggtgaactcgttccttgttgttgaagctaatcattccttaaatgaggtactaataccttgtgattactttattatgctaaggtgtttggtaggtgaaccatctagaactttgagaaggcaacatggcaataaaagctgctccacttgaggggatttcgaaactacaacaagtgcaagtttaagaggacatatctttcagctcccaaggttgtttaatgcaaataagtacttgttggaaaggtctctttgtctactttctagtagatcaagagtcaaggagagaacgcatccaaggcgtccaggaacggccgagacaacttcatgactccaccagcccgagtgatttcgtaattgcaagcactaaattaaatggagcatatccttcaactcccaaggttgtttaaagcaaataagcacttgttggaaaggtctcttcgtctactttctagtggatcaagaatcaacgagagatcagacactaagtgatgtagctgaggtgcccgatctttcggcgagtagagataattccgatttggcggaagatgacccttgcgatccgactacgacgagcaagcccgaggcgccaatgcaatcgctgaaccaactccctgtggttaccgaccttgctgatgcgagatcggcctgatcacgaagatcgtttcctgtgcgcaatcgaagaacgaacaagaaaaagttacgagcaatctaattatcactcgaaggtggagttctgaaatacacgaggacagcgtagatttgcgcatgttcaagagtagctaaagctaattgtaaaacaaaactcaagtctgacaagaaaagaagcctccatctaaatagagggagagaggggggcgcagcccctagggaatggcggccagggagggggcgcagcccctagtggtggacagccctaggcgcccacacaagggcgtcagttgggccagcgtctaatcttctgggccttcattcttcagtagcatgacgaagtttagatctcttgcacgggcccgagtgattggtccagataaggaagaaggtggcgcctgaggagaaggtgcatctggtggcgctggaaaaggtgctgctagtgtagttgtactgctgttgtatttgatgtcctcatcatcctccccttctagaaccgaagtcgtcctcgacagcaactcctcatcctcacccacatatggtttcaaatatgcaacattaaaactagtggaaacaccaaattccgcaggtaggtcaaggatataagcattatcattaatctttgttagcaccttaaaaggaccagtagcacgaggcatcaatttagaacaacgcaaagtaggaaaacgatccttgctcaaatgcaaccaaaccatatcaccaggtgcaaaagtaacacattttcttcctttactaccagcaacctgatacttagcattagcagcagcaatgttttggtgtgtttgttcttggaggtcaatcatttgttcaacacgtgcaacaacctcgatgtgtggggcatcctcagcatcaagcgaaaacaaatcaataggtgcccgaggaatgtaaccataaacaatctgaaaggggcacatctttgtagaagaatgtgttgcacgattataagcaaattcaatatgaggcaagcaatcatcccaacgtctcaaatttttgtctaaaacagccctaaccatggttgataaagttctattcaccacctcagtttgcccatcagtttgagggtgacaagttgtactaaacaacaatttagttcccaatttattccaaagagatctccaaaaatgattgagaaaccatcacgatcagagactattgtattcggaataccatgcaaacgaataatctctcgaaagaacaattcaataacactgctagcatcatcagttttatgacagggtataaaatgagccattttggagaatctatcaacaaccacaaaaatgctatccctccccttcttagttctaggcaaacccaaaacaaagttcatagaaatatcaagccaagggaacgtagggacaggcaaaggcatatacaaaccatggttgctcaatcctgacttagctttctgacaagtagtatagcgtgcaacaaggcgctcgacatcacggcgcatccggggccaaaagaagtgtgcggccagcaccccgtgcgtcttgtagacgccaaagtgtcccatgagaccacctccatgcgcttcatgtaacaacaaaagacgaaccgagcttgctggaatacacagcttgttagcgcgaaataggaacccatcctgcatgtggaaatggccccatggtctgccatgcatgcaatgtattaaaacatctttaaaatcagcatcgttgacatattgatccttcacagtttgcaagccaaaaaatttaaaatctaattgtgaaagcatatctacgaggcggcacattagcaatgacattttccttcccgttcttggattcgg

SEQ ID NO: 683 - DNA, 2848 bp, Zea mays
  source (0)...(0): Zea mays BAC clone full insert sequence contig bacb.pk155.h15.fis20
ttttataaaattgttatttcaattttttaaaattcaagatcacgcgaaccaattagaagctaccacatgtaaacagacaatgggtaccaactgatcaggttccaacatggttggtggtcagcaacttaagagatgcattaattgagacgacaccgagctgccccatcattcggttggactggtcttaccgtgacttgccgtcccatgcacagactcctcgtttataacacctcaaaaccctattttgggatttataaaggttctccaaaagatttgagtttaaatgtattttaaaagtataaagaaaataaaaaaagaggttcaaactttggtagttcaaacttgaagttaaaaactctaaactaaggttaaaacagagaacatagaaacattttcaattgtttaattagcaaaactattcattatagtgcctaggaaccatctcttcgtaggaaataatcacaaattcttgtacaaataaaactatttagaattaatgtttaaagaatattcagcaaaagatttaagatgatatatgaggaattgttttcttagaatagtgtcttttgtgtatataagtttcatattaagaaactctttgtttaatagataaaataagataaataaaatggaattatgcatttcatgttgggtctttggatgttgcattaaaattgaagcttgagaatcaaattaaatttgaatttggaattcaaaactgacattgaaaggaatcaggattttagaaaaaaataagaaaaaaaagaagacatatcagcctctcaaggttgaatctgcctcgttggctcgataagcctgcacctccgcaccggcacatgaacagatcagcgccgacaggcctaccccacctgtcagccatgcggggcctgccgcttagccccagacgtcgtgcgcaagtcttcaacgtcgagcgctcggttttgctgccagtgtgcccatcatgtcaggcttatcccctctaccagaatgttgtgggcgccgccatggatcccgcttggatccttccccaatccaatcctagtccactgcatctcataaatagaactggccatgatcccccctctactcaatcctattgatgagagaaaaattgtggccatgttgtggagctgggatcaccggagccgtgcgtaagcaccgtcatgagagagcaccgctgccgccgtcgatccgccctgtgtgtgaccccctaacctcgatgggtggtacttgggtgtcccaggttttcgtcacgcatgttggtggcttcaccaggcgagaaccacggtcgggggaaccgacaattgctcatcagagcaatcctcctctgcggtgtcgctcgcaaccgtgggcaggagcgtctgcgctgacaacagaggtaagaaacaatctatgtagtttgtgttgcccctcgtgttccactagttcatttcgagttttgtgcaccgggagccgctcgggcttgttgtcggccatggcgccgccgtgggaaaaacgcgacgccatgggcttcagcgcgccggccctggctctcgtcaaggctgaggaggtgagtgatgaccatcggattctgatgaacgctcttgattaaaagaaacatacctcttcgattcatttgatatgagccgttgatcggctatcggatgagttagatcagatcgcgccatcatcggattacggactgcggatcagagatcaaacaattatgaataggtctgattcaccttttaatcaggtgccttcatcagggatcccacgatcccggttgtattccggttcatttaaagtaggttctaatcggggccgttggatgtggatagggcaactctagttggctcgtacccctttggccagggaatctttccaaagagcccctctagattatatgaatcaacccacaatctagccccatttaaaaatcaatgccaacgggtccttacttttataaaataaaccctgactttcttggaattggtatctgtcgtccaaaatttaacttatttacataaaataaaatctagaaaatgatttttgatataaaaataaatctaaaaatcttagataaatcataacttgaccattttaatctgatttagtctgttccagttgcattagcttcttaataatattccctatgcttttgtaacattattttatcatgtaacatgttctcaaaataaataactaatttgtttaacctatgtctattgtattaactaatttaactagagttagtatattattttaatttggatcatctataatttgtctggaatataatttaattgtaacttagattaaaagttgagttagatatatcttttctcacatgatttatatagaatatatttaatcacctaaaactttaggaaatcatatcttttttaatcgtaactctgattttttgtggttctcgaacctatgatctcgtagcagcgcgtagaatattcttacactgtttgttcttatgctttggtgtaatgttaccatacccattatttgcttgactgtatgtattgctatgcatagcagcgaggtcacgagaaacccgaagaccaacttggtgaagtacttggaatctcaagtcacaggcaagttatgatcttaatcactcttctttacctaataatgttcctgttaatcactatgacatgctcagtttaatttgttgggacccaataggttaccctagttttgtttaccccacaccttgcaaacaaatgaacaattgggtagacttgttattgctctacctagttttgggattaatgttatactgaactatgatcatgttccactattgttgttggtttaattatggttcatgataagactattgtgctatcgg

SEQ ID NO: 684 - DNA, 3784 bp, Zea mays
  source (0)...(0): Zea mays BAC clone full insert sequence contig bacb.pk155.h15.fis21
ttaacccttgatggtgaatgatccacttaaatcagagagagtttaatcttgctactaaagatttttggtggtatacttagtaatttagatcacactcagtgaaactaagtggtaagtccattttggtgttccactgaattctttttaaagccttagtgagaattgtcaagatttcaagttgaacttattggggcgaggtttatctttcatttctttccctctatttcttttatgtttttagagtgggtttgaactacaagttgtcttaataaatttccaaaaattctgtaaaaattacagtggcttattactggtgtataattctctgtcctaaaatttggggcttaaagggtgaatagttctctctggataaaattatcaaatattaggacagaaggggtgttttgaaccacaactaccatttaacagtagtttatcctctaaaacttatttttgctggcatttagatgttataacatgactttgtacaaacttttagccattgatatcctctagtcattttactatgattttctaaagtttctagtcaaaggggtgctttctactaccactatattcaaaaaatatcaaacaacatatttctgatttttcctagcttcttctttgtgcaagagcaatcattctgaattttggcatttgttttcttaagggaatggtggtaggaattatttggattaaatagcctttttcataaagtattggcaataggtattattttgcatctttcaaatgggtttgtatttttttctggtgggctatctcattattgatctagcaaaattttatttgcccattattgcattattttgggttactcatgatttatttgaaatatgactcattatcaagttctatttgtgaccctacttaaaatgatgggctggggtgttatcatttttgtagtggggttctactggttacacgtccactggatttttattaacaattttggatttgtttttataattccaataattgttttctagttggaataatgctaaataaaacatttcactttaattctgttctggactagtggcccctttatttttcctaggttctctgttacttaagtaggctacgaaaaataatggcactcattgttcattattttctaatgtatttctgattttcctaagttttgggcaaaaatggcttttaatagatatccctactaaatttttcaatactcgggttctcactatttttaaacagtgtttaaatggggtttgaacatctacaaattttcttaggttcagcacagaagcataactaattttctttaatttaacaaggtttagtcagtttctgtatttaattccaaactctaaaatttagaacagaaagcatgaggttcagtatttttaattggtagtccatcatctttagaatctagcaaaattggtttgataaattttggttaagtatttctcaagttatgaatttcctaagttctctgtttattaaaaagattaaacagaaatgattaaatgggaaacgactttgcaacggggtccctggcaggtgttttcaagtttccttacagactagtccttgggctactattcaaatgtgtcgctgacagttcagaaaacctcctggggttcctctaaacctaacccgaggtccttcccccaaattaaacagtacccgcggcggaggaaagggcggaggggcttacgggcggcgagactgctccggtgaggtggccgagggtgtaggggaggtcctgagggtcacggcgatgtgcgggtcgccgtcagggatggtcggagtcggccggtccacgtgcgcaagcgggggagctcgtcggcggcgaggagttcggcctatccagggcacaattgaccaatcaaatgggtcagagagcttcaccagggatcaaggaaggtgtgtgtgctaggaattgaagaacggctcaccggattgctcggtctacgcgcgaaggcgggcgaccgaagtccggcgaggacgatcttggttctcaagtgaagttttgtcgggtccgagagcttgggaagcttcacaagctattgacgaagctaaccgagcgactggtgcggcttagaagcgactggagtgggctagccacggtggccgaggctcgagtggcaatggcgggcggatgagagctcactggagctaaggaggggcgtctggccagtgaaggtgagcacggggtgaggtgaggcgcgcccgggaaggctttataggcgcgggcgggcacggccgagggcgaggctctgacaagtgctcggggcgtgcgcgggagaacgccagtgcgcgctctagcgcctggcacagcgtcgagcacgagacagcgcaattagggttggtattagggtttcaacacttttccctttttgaaaaaccttatttgtttggaacatggttctttagatatacacttagtagatcttttcttctcaagttaatttgatgcttcatgcttaatttggctcacataaaatgttaatacttgggttagcactgagagaaaccctaggtgacactggggtgtcacaaccttccccccttaaaggaatctcgtcccgagattcgggtcagagtccttccggggtgaagcgaagggtgagacttacaagaagtgggtgctctattattagggcaaactgctcttcgaatgtcattctctttgcaacttcagaaggaagtccttttaaattttgattcataattacttcattctgatctaagattatatttctgaaatttagattcgaagggcaggaggaggggttgggtatgattacgtaccaatttccttaggtaggtaatcggggaagttggatcgcaagaattcctcagtctcccaagtagcctcttcctctgagtaattactccactggaccttatacaacttgattgatttagcccgagttgatctttccttgcaatccagaatcttggaagggtactcttggtacgatagatctggctctatctccaattctggttctgctatgatctcggtcggcaatcgaacacacttcttcaactgagacacatggaacacattgtggatgacacacatttttggaggtaacttcaatttatatgccacgagtccacatgcttctatgatctcataaggtccaatgtaatgaggggctagcttgcctttgattccaaacctctgcactcccttggtgggtgatactttcaaatacacgaaatctcccacctcgaactggagaggtttccttctcttatcatggtaactcttctgcctggcctgagcagcttctagattcttcctgattagtttgaccttcctttcggcttcagtcactaagtcaggtccgaaaacttctctttctccaggctgagaccaattgagtggtgttctacaccttcttccatagagacctttgaaaggtgccatccttaggctggattgataactgttgttatcactactacaaaacatgttatatgagacggttaatttttagttcttaagacgcttatgaagtgtccaaatttgatggagtcgtaaaagatgtcccacatttaagatggttataaaccgtattaaaagatattatataagacaatttttaatttataaccgtctgaaaaaggtatttgtttaagtcattttttccgataaaccatcttgaattaggtttttgtttaagacactgcttctaaagaaccgtagagaatacaaacattataagtcataaagtatttatcaaactgtctcgaatatcctacaataatagaaagattacaatag

SEQ ID NO: 685 - DNA, 4800 bp, Zea mays
  source (0)...(0): Zea may BAC clone full insert sequence contig bacb.pk155.h15.fis22
tatgctgctcactaaaaaattgacttgggtagagcatgagttcactcggcagtttctggacgtttagtgtctgatctcttattgattcttgatctactagaaagtagacgaagagacctttccaacaagtgcttatttgctttaaacaaccttaggagttgaaagatattctccatttaatttagtgcttgcagttacaaaatcacacgggctggtggagtcatgaagttgtctcggccgttcctggacgccttggatgcgttctctccttgactcttgatctactagaaagtagacaaagagacctttccaacaagtacttatttgcattaaacaaccttgggagctgaaagatatgccctcttaaacttgcacttgttgtagtttcgaaatcccctcaagtggagcagcttttattgccttgttgccttctcaaattctagatggttcacctaccaaacaccttagcataataaagtaatcacaaggtattagtacctcatttaaggaatgattagcttcaacaacaaggaacgagttcacctgataattaaatttacgtgcacggactcgtttcactggtccatgaataatggtgaagggggtcgctggtgtggtgtattgatggcagtgatgtccttatcataggccttgcccatttcctcgctatcgacgacatcgattatccgttgtatcttattttatgaactcttatcagcaacttgaaaaactccgatttatgtaataattcagtactttcatttgaggtttcctgttttattgtatttcttttgtgactcaccttcgagtgagtatgtggtatttgatcctggttaagtggctctatcagactagatctgagggactgacgggttattccgatttaagtgtgttgcagcccttgaggcgtgacttaggcacttaagctggaataattcgggcagttctgccacaatttcgttgtcgcacgtcacccattccgaaaacgggtgtcggggtgcatacaaagcacgagtatttaccaccggaaccatttcttcgtttttcgcaacgaacttgcccaatccaatactttaggtccaaaactcatgtttcgggtggtttcgcgcaatttcgttgcagcacgtcacccattccgaaaacaggtgtcggggtgcatataaagcacgagtttttttccaccggaaccatttctttgttttttgcaacgaacatgcccaatccactacattaggtccaaaattcatgtttggggtggtttcgtgcaatttcgttgtcgcacgtcacccattccgaaaactggtgtcggggtgcatacaaagcacgagtttttgccaccggaactatttcttcgtttttcgcaacgaacatgccaaatcgagtatgttaggtccaaaacttatatttttggtgatttcgcgcaatttcgttgccacacgtcacccattccgaaaacgggtgtcaggtgcatacaaagcatgagttttggccaccggaaccatttcttcgtttttcgcaatgaacatgctcaatccacaactttaggtccaaaactcatgtttggggtggttttgcgcaatttcgttgccgcacatcaccctttccgaaaacgggtgtcgatgttcaagcacaagtttttgcctccgtaaccatttcttcgtttttcacaacaaacatgcccaatccactactttaggttcaaaacttatgtttggggtggtttctcgctgatagagctggagtgcccgatctttcggtgagtggagataattccgatttggtggaagtagaccctcacgatccgactacgacgagcgatcccaaagcgccaatgcaatcgctgaaccagcttccaatggttactgaccttgctgatgcgagattggcctgatcatgaagatcgtttcctgtgcgcaatcgaagaacgaacaagaaaaagatgcgagcaatcttaatatcactcgaggtggagttctgaatcatagaggacaacacgtatgtgtgcttgttctggggtagctaaagctagatgtaaaacaaaactcgaagaacaaaggtggcacagctcctatataaatagagagagggggcgtagcccctaggggcggccaaccctaggtcgtccactatgggccgcagttgggctggtcgtctattcttctgggccctcattcttcagtagcatgacgaagttaagatctctggcacgggcccgagtgattgacccagctaatgaaggaagtggcgcttgatgtggaggtgctgctggtgtagtcgtactcatagtgatgtcctcatcatcctccccttcttgaagtgaagtcgtcctcgacggcaactcctcatcctcggccatatatggtttcaaatctgcaacattaaaactagtggaaacaccaaattccgcaggcaggtcaaggatataagcattatcattaatctttgttagcaccttaaaaggaccagcagcacgaggcattaatttagaacggcgcaaagtaggaaaccgatcctttctcaagtgcaaccaaaccatatcacctggctcaaaagtaacaagttttcttcctttactaccagcaacctgattttttgcattagtagcagcaatgttttgttgagtttgttcatagaggttaatcatttgttcaacatgtgcaacaacatctatgtgtggggcgtccgcggcatcaagcgaaaacaaagcaataggcgccctaggaatgtaaccataaataatttgaaaagggcacatctttgtagaagaatgtgttgcatgattataagcaaactcaacatgaggcaagcaatcctcccaacgtttcaattttttgtctaaaacagccctaagcatggtagacaaagttcgattaactagctcagtttgaccatcagtctgagggtgacaagtggtgccaaacagcaatttagttcccaatttattccatagagatctccaaaaatgactaagaaacttagcatcacgatccgagactattgtattgggaataccgtgcaaacgaatattctctctaaaaaacaattcagcaacattgctagcatcatcagtcttatgacaaggtatgaaataagccattttggagaatcgatcaacaaccacaaaaatgctatccctccccttcttagttctaggcaatcccaaaacaaaatccatcgaaatatcaatccaaggggaagtaggaacaggcaaaggcatatacaaaccatggttgttcaaccgtgacttagctttctgacaagtagtgtagcgtgcaacaaggcgctcaacatcagcgcgcatccgaggccaaaagaagtgggcagccaacacctcatgtgtcttgtagacgccaaagtgccccatgagaccgcctccatgcgcttcctgtaacaacaaaagacgatccgagctagctagaacacagcttgttagcgcaaaacaggaacccatcctgtatgtgaaatttgccccatggtttctcattaatacaatggccgaaaccatctttaaaatcagcgtcgtcaacatattgatctttcacagtgtgcaaaccaaagattttaaaatctaactgtgacagcatggtatagcgacgagacaaagcatcaacaataacattgtccttcccgttcttgtatttaataatgtaaggaaaagactcaatgaattctacccatttagcatgacgacggttcagatttgtttgggtacgaatatgttttaaagcctcatgatcagaatgaattatgaactcacgatgccaaagatagtgctgccatgtatgcaaagtgcgcactaaagcgtaaagctccttatcataagtagaatatttcagactagcaccgcttaatttttcactaaaataagcaactggttttcgttcttgtaacaaaacagcacctagcccaataccgctagcattgcattcaagctcaaacactttattaaaatcaggcaattgcaataggggagcttgggttaacttatcttttaaagtgttgaacgcttcctcctgcgaatcactccaagcaaacggcacatctttctttgtaagctcatgtagaggcgctgcaatggagctaaaatcacgaacaaatctgcggtagaaaccggcaagtccaagaaagctctgaatttgtgtgaccgtcgtcggtgtaggccactcccgaatggcagcaatcttgctgctatccacctcaatgccctgtggagtaacaacataaccaagaaacgagacacgtcgtgtgcaaaagatgcatttttccatgttagcaaataactgggcagcacgcaatgcatcaaaaacagcacttaaatgttcgaaatgctctttcttatatttgctataaataaggatatcatcaaaataaacaaccacaaacaatcctatgaagggcctcagaacttcattcatcactcgcataaaagtgctgggagcattagtcaatccaaacggcataaccaaccattcatataaaccaaatttcgttttaaaagtcgttttccattcatcacccagtttcattctaatctggtggtaaccactacgcaaatcaatcttagtgaaaataatggcaccactaagctcatctagcatatcatcaaggcgtggtataggatatcgataacgaatagtgatgttattagtagcacgacagtctacacacatacgccatgacccatctttcttgggaacaagtaacactggaacagagcaaggctaagagactcacgatgtatcccttgtctagcaacgcctgtacctggcgctgaatctccttcgtttcatccggatttgt

SEQ ID NO: 686 - DNA, 3857 bp, Zea mays
  source (0)...(0): Zea mays BAC clone full insert sequence contig bacb.pk155.h15.fis23
cgacggcgatgaaaaaaccgctttgtatcctttctccttcgcccctttttgtttctgttttttttacgtaaccgaaggagaaaaacaaggaagcgacgttgactcggtttgtttttttttctgttttttttgacgtaaccgaaggagaaaaataaggaagcggcgttgactcggtttgtggcgttgactcggtttgatgtaaccgaaggagagaaacaaggaagatggttgcggcgcgctagggaaaatgtaaccgaaggagaaaaacaaggaagatggttgcggcgcgctagggtttgatgtaaccgaaggagaagaacaaggaagaaagaaggatggtgagaaaaaacactatgcgaccagcaacaaatgacgcgaaagcacacaaattcaacaatgcagattattgaaagaaggtgcgaggctcaaaagggtgctggtataaggtctaccctgaatttttatgtggttttgtggactgtaggagaaaaaaacactcgataaactcaccgatcaacctggaaatctgataccacttgatagagctggggtgcccgatctttcggtgagtggagataattccgatttggtggaagtagaccctcacgatccgactacgacgagcgatcccgaagcgccaatgcaatcgctgaaccaacttccaatggttaccgaccttgctgatgcgagatcggcctgatcacgaagatcgtttcctgtgcgcaatcgaagaacgaacaagaaaaagatgcgaacaatcttaatatcactcgaggtggagttctgaatcacagaggacagcacgtatttgtgcgtgttctggggtagcaaaagctagatgtaaaacaaaacttgaagaacaaaggaggcgcagctcctatataaatagagagagggggcatagcccctaggggcggccaaccctaggtcgtccactatgggccgcagttgggttggtcgtctattcttctgggccctcattcttcagtagcatgacgaagttaagatctctggcacgggcccgagtgattggcccagctaatgaaggaagtggcgcttgatgtggaggtgctgctggtgtagtcgtactcatagtgatgtcctcatcactcgcaattttgttgccgcacgtcacccattccaaaaactggtgtcggggtgcatacaaagcacgagtttttgccaccggaactatttcttcatttgtcgcaataaacatgtccaatccacaactttaggtccaaacctcatgtttgggatggtttcgcgcaatttcgttgccgcacgtcacccattccgaaaacgggtgtcggggtgcatacaaagcacgagtttttgccacaggaacaatttcttcgtttttcgcaacgaacatgccaaatccagtatattaggtccaaatcttatatttggggtggtttcgcgcaatttcgttgccgcacgtcacccattccaaaaatgggtgtcgggtgcatacaaagcacgagtttttgcaccggaaccatttctttgtttttcgcaacgatcatgcccaatccacaactttaggtccaaaactcatgtttggggtggttttgcgcaatttcgttgccgcacgttaccctttccaaaaagggtgtcgatgtgcatacaaagcacgagtttttgccaccgtaaccatttcttcgtttttcgcaacgaacatgcccaatccacaactttaggttcaaaactatcgtttggggtggtatctcgcaatttggttgccgcacgttacccattccaaaaactggtgtcatggtgcatacaaagcatgagtttttgccaccagaactatttcttcgtttttcgcaacgaacatgtccaatccacaacttgaggtccaaactcatgtttgggatggttcacgcaattttgttgctgcatgtcacccattcagaaaacgggtgtaggggtgcatacaaagcacgagttttggccaccggaaccatttcttcgtttttcgcaactaacctgcccaatccactactttacgtccaaaactcatgtttggcgtggttttgcgcaattttgttgccgcacgtcacccattccaaaaacgggtgtcggggtgcatacaaagcacgagtttttgccaccagaactgttggggacttgttctcaaatgctaagagttaagaacaaggcaacataaaaagtgttaagtgttaaagtccttcgtccttcgaagcattatgtcccttctgatgaagacatccacactactgatgcatctataccaatacaagtaccaatttctggtcccattactcgcgctcgtgctcgtcaactcaaccatcaggtgattacactcttgagtttatgtccatcatatttagaccatggagacccgtgcactcttgttttgcttaggaatcagggagaagaccgaaagggaaaaggatttgaacatgctggattcggactgcagaagaacaccaacttgtgacggtcaccacggtcagatgcgggctcggattggaatgttcaagcacaacatggaaagcttatcaagtctactttcatatggatccggaattatagtcatatctgttctgaggccgccgtaatcattgttttcttatcgagacatttcctgccttttctgcccatggtgctgcgtcaccctattttggcccaatgggtcgtgtatcaagttaggtccattagggacgcatcctagggttgcagcacgaccccaatacccttgtggtcgtcctcccatgtttataaaccccctagccgccaccaagaacagcgggttttgtttagatcaagtttagctctcgctacttgcttgcaagcgcgcgtgctagttcagccgcccgtcttcttgtcttcggaaccccaccatattggagtttgatctttaaacctacatttagatctggtaattcagtacttgttctacttgttcttgctagttcttcgattgcttgcaggacgagtgccctagtggccagggtgtcacgctccacaagatcgtgacagccataggaggtggtgtatcggttgctaaggcgcagcgtctttggaaggctgtagtcgggccgtgaacgtcgtctcctcccccaatcgagttattccacaccctctcatcgaaagatcgggcaatcacccaacgggtgcacatcagttggtaatcagagcaaggtttatcggtgagagatttacttttcttcgctgttttcttatctcctatagtccagaaaaagccaaaaaatagtagattagttttaccgcaatcctataaaccattgagcatttactagtactacttagttagggcttgttgagtttttggttgcatcggttgtgtcgagttgctggtcttagtttattcctttagagttttgagttctaccacgttttggtcaccacgaaatccaccatcaccaaaaacatctctggttcgtttttgccaccacggatacatatcatatccgatttggaagtttaaatacaacctggaaagcttatcttatcttctttccaacggatctgaccttatctcaaaattcgttctgagggctccgcaatcatcgtagagatttctggacttcctatattaacaagatttgttaaatctgatttaaaggggttgttagcaatatctttattgtttgggttgtcatagtgaaaaaaaagggtttaggcccctgcaaaaaaaaaaaacagaagaagaagaaaaaaaagaatagaaaagaaaaaaaaaggaaaagaagaagaagggggctgaatctctaaatctgttgtttctctttgtgctgtgctagttgttctttttcagtgactcactagtgtgcctaggctcacgtctctagcctggtttcgacagt

SEQ ID NO: 687 - DNA, 5803 bp, Zea mays
  source (0)...(0): Zea mays BAC clone full insert sequence contig bacb.pk155.h15.fis24
ccgaaaattttcggaatgggtgacgtgaggcaacgaaattgcccgaaaccaccctaaatataagttttggacctaatatactggatttggcatgttcgttgcgaaaatcgaagaaatagaaggtggcaaaaactcgtgctttgtatgcacctcgacaccagttttcggtatgggtgacgtgcgacaacgaaattgcgcaaatccaccccaaaagttttggacctaatgtagtggattgggcatgttcgttgcgaaaaacaaagaaatggttctggtggaaaaaaactcatgctttatatgcatcctgacacccgtttttggaatgggtgacgtttggtaacgaaattgcgcaaaaccaccccccaaacttaagttttggagctaatgtagtggatttggcatgttcgttgcgaaaaacgaagaaacggttccggtggcaaaaactcgtgctttgtatgcaccccgacacccatgttcggaatgggtgacgtgcggcaacgaaattgtgcgaaaccaccccaaacatgagttttggatgtaaagtagtggattgggcaggttcgttacgaaaaacgaagaaatggttccggtggccaaaactcgtgctttgtatgcaccaacacccattttcggaatgggtgacgtgcggcaacgaaattgcgcgaaaccacccgaaacatgagttttggacctaaagtagtggattgggcatgttcgttacgaaaaatgaagaaatggttctggtggcaaaaactcgtgctttgtatgcaccccgacacccgttttcggaatgggtgacgtgcggcaacaaaattgcgcaaaaccacgccaaacatgagttttggacgtaaagtagtggattgggcaggttcgttgtgaaaaacgaagaaatggttccggtggccaaaactcgtgctttgtatgcacccctacacccgttttctgaatgggtgacatgtagcaacgaaattgcgtgaaccatcccaaacatgagtttggacctcaagttgtggattggacatgttcgttgcgaaaaacgaagaaatagttctggtggcaaaaactcgtgctttgtatgcaccatgacaccagtttttggaatgggtaacgtgcggcaaccaaattgcgagataccaccccaaacgatagttttgaacctaaagttgtggattgggcatgttcgttgcgaaaaacgaagaaatggttacggtggcaaaaactcgtgctttgtatgcacatcgacaccctttttggaaagggtaacgtgcggcaacgaaattgcgcaaaaccaccccaaacatgagttttggacctaaagttgtggattgggcatgatcgttgcgaaaaacaaagaaatggttccggtgccaaaactcgtgttttgtatgcacccgacacccatttttggaatgggtgacgtgcggcaacgaaattgcgcgaaaccaccccaaatataagatttggacctaatatactggatttggcatgttcgttgcgaaaaacgaagaaattgttcctgtggcaaaaactcgtccttgtatgcaccccgacacccgttttcggaatgggtgacgtgcggcaatgaaatcacgcgaaaccaccccaaacatgtgctttggacctaaagtggtggattgggcatgttcgttgcgaaaaacgaagaaatggttacggtggcaaaaactcgtgccttgtatgcacatcgacacccgttttcggaaagggtgacgtgcggcaacgaaattgcgcgaaaccaccgcaaacatgagttttggacctaaagttgtggattgggcatgttcgttgcgaaaaacgaagaaatggttccgatggccaaaacatatgctttgtatgcaccccaacacctgttttcggaatgggtgacgtgcgacaacgaaattgcgcgaaatcatcccaaaaaagagttttggacctaaagttgtggattggacatgttcgttgcaaaaaatgaagaaatggtttcaatggcaaaaactcgtgctttgtatgcaccccgacacccgttttcggaatgggtgacgtgcggcaacgaaattgcgcgaaaccaccctaaatataagttttggacctaatatactggatttggcatgttcgttgcgaaaatcgaagaaatagaaggtggcaaaaactcgtgccttgtatgcaccccgacaccagttttcggtatgggtgacgtgcgacaacgaaattgtgcaaatccaccccaaaagttttggacctaatgtagtggattgggcatgttcgttgcgaaaaacaaagaaatggttctggtggaaaaaaaactcatgctttatatgcatcccgacacccgttttcagaatgggtgacgtttggtaacgaaattgcgcaaaactaccccccaaacttaagttttggagctaatgtagtggatttggcatgttcgttacgaaaaacgaagaaacggttccggtggcaaaaactcgtgctttgtatgcaccccgacacccatgttcggaatgggtgacgtgcggcaacgaaattgtgcgaaaccaccccaaacatgagttttggatgtaaagtagtggattgggcaggttcgttacgaaaaacgaagaaatggttccggtggccaaaactcgtgctttgtatgcaccaacacccattttcggaatgggtgacgtgcggcaacgaaattgcgcgaaaccacccgaaacatgagttttggacctaaagtagtggattgggcatgttcgttacgaaaaatgaagaaatggttcttgttgggggctttcgtcctccgaaggtcctcaaaaacatgatttgacaatgttttccaagtggattatgtgaacaggtaccttcggactcagaattacgaacatgaagtgcggtcaggacgaagcctgaaccagacgaaggacgggctgattaccaagctccacgaaggatggtgcacagccgaagctgtgcgcagggaagcttcgtcgcgatagcagagaggggaaccgacttaaagatgaaaagactacgtgggccttgtcagatttccataagtcattgacaaatgtaatggacataaatgtaattttacgtgggctgcgtcccgcgtctataaatagatgaacagtactcccgtactgttcacgcgaacttggcatttgcttttgcgtcacgcttgtactttttatcttctctcaggaccgaaggtacatttgtaatttgaaatcatttctatttttccatgttaataaaatagaaatgattctatgatgatgcttatattatatttcatgctttatatgaatccttcgtcattacttgttatgtatacgaaggtatgtctcttatgaccttcgtccgaaactcattatttcccgaagggacataatgcttcgaaggacgaaggactttaacacttaacactttttatgttgccttgttcttaactcttagcatttgagaacaagtccccaacattggcgcccacctccggtgaactcacttccacttcgagttttttgaacaccttcggaagctatagaccctcgctatggcgccgaagaaagcttcagtgactggggctgcagcactgcaaccgctggaccccaaccaggagaccgtctctcttcgggaggcccgaaaccagaagaggaaggctgtcagcccgacgattcaggaggatgaactagaccaagagaccagggacatggagatgctacatcaacaggtgcagaggaagaaggagaagatggccaggctagctgagctgcagaggcagatagacgaagcttctgaagaagtccgtcatcttacccacgatgagcagaaccgaaggcctcaacaaaaagaccttcatcaggagggcttcttcaatgaagatgactggtatgacaatttccatcatggaaattttgttttcgacgatgcttctcctctgtccgctgatctgcaggctacaccttggcctccatcctataagccaccccagcttcccatgttcgatggccattcggacccgaagcagttcttgatgagttacgaagcaacagtgtcttcgtatggtggcaatgctgcagtaatggcaaagtctttcgttatggccgtcaggagtgttgctcagacctggtattcctcccttcggccaggaacgatcacttcatggcagaagctgaaggatatgttattgaccagctttcaaggatttcagacgaagccggtcactgctcaagccttgttccagtgcactcaggatcatgaagaataccttcaggcgtatgtcagaaggttcttgcgtttgagggcgcaggcaccaacggtgcccaatgaaattgtcatcgaagccatgatcaaggggcttcgtcctggacctgctgctcaatactttgctaggaagcctcctcagaccctggagaagctgctccaaaagatggacgagtacattcgtgctgacaatgactttcgccaaagaagggaggaggccttcagattttctgaaatgaccaggggcttcggaggaagatcctatccgaggcatgtcaggtccatccacaactctactcagaatgatgataaggggagtcagcagaacagaccgcagtgctcctcacaggcttcggggcaacaacaaactttcttccggccaccagctccaagaggcagaggcgccaggggcttcggcggaagattcggagatcaaccaaggaaactgttttgcttgttctgtggagaaagcaagggccataccaccaggacgtgcgatattacaatccagaagcaaaaggaaatagccgaagctgcatctcaacaagctcagccgaagcaggtcatgcatactgcttcgtatcatccaccttacatcccacaatacatagacaaccaccctgcagcttctgtagcttcggcaagtcaacctcaagcttcctggcagcagcctccgcctccacctccactgcaacagggtcaacagccagaagggagtcaatatgccccacaccaaagggacttcagagaacaatccgaagctcgcacagtcaacagcactgtgccagagtcgaagcacatttattgacacatatcctacctttgatagcagtcttttctattcagttttattttctgtgaaacaaagaacattgttagttttcatgtaataatttcgttgtttcccacgaggaaaacccattttcttcacaggcttaagtccctgaagcttaaaatttttttttgcgctaacaaggaggaccttcgaattattaaaaatccttcgaagcaacagaaagtcgttctaaggaacgcagagtaagttgatgaagtcacaaaaagccgttccaaagggagcgcagtgtaagttttctgctcaaaagtcgttcctacgggaatgcagagcttacagcgaaaagtcaacgctgataccgccaaagtaaaaggcgaagaagctcctaagggaggcttacagcgaaaagtcaacgctgataccgcctaagtaaaaggcgaagaagctcctaagggaggcttacagcgaaaagtcaacgctgataccgcctaagtaaaaggcgaagaaactccaaagacgttcctaagggaatgcagagtttacagagatattttgtgtgtatcttcggaacaaacgtcatttgcataacataacatcatcacaccattttgcatagcataagcatcatacatcatgttgcatatggcaaaagaaggggacaccgtatcaaccttcgaaaggacgctttgagaaagtgaaaattgtgtaaagtcatgaggaaatacaatgataatcttcggaatacagcttcggagaatgtttttacga

SEQ ID NO: 688 - DNA, 5561 bp, Zea mays
  source (0)...(0): Zea mays BAC clone full insert sequence contig bacb.pk155.h15.fis25
ctcgaaaccggccatccatgtatcgcttctaccttggcttgatcatcctcaattccctgtggagtcacaacataaccaagaaacgaaactcgatcggtgcaaaatgtgcacttctcaaggttaccaaataaacgtgcatctcgtaaagcattaaaaacagcacgcatgtgatcaacatgttcatccatagatttgctgtagatcaatatgtcatcaaagtatactaccacaaattttccaatgaaggcacgcaaaacctcgttcattaatctcatgaaagtgctaggtgcattagttaacccaaaaggcatgactaaccactcatacaatccgaacttagttttgaaagcagttttccattcatctcccaatttcatacgaatctggtggtacccactacgcaaatcaactttagaaaagacaatggcaccactcaattcatcaagcatatcatctaaacgtggaatagggtgtcgataacgtatcgtgatattattaatagccctacaatcaacacacatacgccatgttccatcttttttaggcactaaaataaccggaacagcacacggactaagagactcacgcacgtaacctttgtcgagtagttcttgcacttgtcgctgaatttcttttgtttcctctggatttgtcctatatggcgcacgattcggcaaagatgcaccaggaataagatcaatttggtgctcaatccctcgtataggtggcagcccctctggtatctcacttggaaatacatcagaatactcctgcaaaatgttagtaataacaggaggcaaagaatgctgcatatcttgaattgaaatcaaaacatccttgcataccaaggcgtaggcaacagtagtggaagcaaataattcattaacatcagtttttgttgcaagcaagcaatgtcctttcaattttatcccatctttgttattaccaacaactttaatattcttgttgttctcagttttagctttggtagctttagcaacatcatcacacacaatagcctcaggggacatgggaagcaaaataattttcttatcatggtgtatgagagaatattgatttgatctaccatgatgcatacaatctgaatcaaattgccatggtctacctagcagaatattacaagcatccataggcacaacatcacagtcaacaacatcacgatatgaaccaatagcaaaattaattcgtaccagcttggttaccttgaccttaccactattgttaagccattgaatgtgatatggatgcgggtgcggtttggtcgtaagtgcaagcttctccaccatgtcgctgctagccaagttgttgcagctacctccatcaatgatcaaacgacatgaacgctccttaatgacacactttgtttgaaacaacgtatgtcgctgattctgctctgccttctccatttgtgcactaagcacacgctgtacaatgaggctctcataatgctctgcatcatctgcaccaatctgttcttcgggtggttccttagtgcctgcatcatcagccgcaagcaaagcaagtgtagcttcatccaaatcactagcagaggaatacccaccatcgtcttttaccaccaaaacacgctgattaggacaatcacgctgcacgtgtccatagcccttgcatcgataacacagaacatctcttgttctacccgtggaggctactgaagaggcactacctgctggtttctgggcagatttggttgctgaatttgtggaagatgcacgtggtttgtcgccggaggaaggcgggggtgctggtcgacttggcgagggagttggtgctggtgtacggccggtcatggacgtagtcgtgcgctgttgccatggtgtagattttcctgcagaaacattagaccttgcactagcacgtcgtccctgcacttccctttcagctttgcaagcaagatgaaacaatcgggttacattagcataatctttataagcaaggatgtcctgaatttccctatttaacccgcccaaaaatctagccatagcagattcctcaccctcctctatgttacaacgcagcatacccatttgtaattcctgataatattcttctacacttttagtaccctgtctcaattgttgcaacttgtttaacatatcacgtgcataataagaaggaacaaatctagcccgcatgacccgtttcaacgcatcccaagtttgtggcatgttattaggattcttcttaccatgttctatccaccaaacagaagcaaattcagtaaactcactagtagcagctctaacccgcgcattctcaggaaattcatggcatgcaaacttttgatcaaccgcaatctcccaagtaatgtaagcatcagggtcatatttaccatcaaaaggaggtattttaaatttaaccttactaaaagcatcatcattaccatgtacctcacgtcggtgaaaaccacccatacctctacggttagtacgtagtcgccggcgattaggtgcttcttggtcatcttgttcagtatcagcaacatagtcatcccagttaccttcggcgccctcatcacgcccaccattgatattagcatgcatctcatcaaaccgcctcaagagtgcgacaaggctcttgtcaatatgagcaactgtcatttccacatttgcaagtttggtgttcgtgtcgatctgtgtggcctccaattgccccatcttttcattcgtcacctgcatgtcattatcaagaccttccgtgtgcgtcttcactagccttacaaagtgttgtatgatacccttggtgcgaggagagtgtggcatattacgagaagcatcatcaacctccaatcctgccatggttagacgaacagaggcaacaaaaaaaaaacgtgaaggaataaaaactctacaactattaggatgtagctactgcaaggcgctcactctcaacctgccacacaagctcttaccaattcttaccttgcacaacaggaggggtcagcaaccaacaagtctgcaaccgtggaataagtgtatcggtgccgcagcaacacgacctgtcaaactgtagtcgaaatatgtagagttgtaggtgggctgaagcaaggaatacactagtaccacgttagttacaaaagcaagctgaataatcgttcaacggtggtactgtgctggtcctaggctaaaccaggctagagacgtgagcctaggcacaaaggtagtcactgaaaaagaacaactagcacagcacaaagagaaacaacagatttagagattcagcccccttcttcttcttttccttttttttttcttttctattcttttttttttcttttctattcttttttttttcttcttctccatgttgtgcttgaacattccaatccgagcccgcatctgaccgtggtgaccgtcacaagttggtgttcttctgcagtccgaatccagcatgttcaaatccttttccctttcggtcttctccctgattcctaagcaaaacaagagtgcacgggtctccatggtctaaatatgatggacatgaactcaagagtgtaatcacctgatggttgagttgacgagcacgagcgcgagtaatgggaccagaaattggtacttgtattggtatagatgcatcagtagtgtggatgtcttcatcacatgtgttttggacctaaagtagtggattgggcatgttcgttgggaaaaactaagaaatggttccggtggcaaaaactcctgctttgtatgcaccccgacacccgttttcggaatgagtgacgtgcggcaacgaaattgcgcgaaaccaccccaaacatgagttttggacctaaagtagtggattggccatgttcattgcgaaaaacgatgaaatggttccggtggcaaaaactcgtgcttgtatgcaccccgacacccgttttcggaatgggggacgtgtggcaacgaaattgagcgaaaccaccccaaacatgagttttggagctaaagtagtggattgggcatgttcattgcgaaaaacgaagaaatggttccggtggcaaaaactcgtgtttgtatgcactccgacgcctgttttcggaatgggtgacgtgaggcaatgaaattgcgcgaaaccaccataaacatgtgttttggacctaaagtagtggattgggcatgttcgttgcgaaaaacgaagaaatggttccggtggcaaaaactcgtgcttgtatgcaccccgacacccgtcttcggaatgggtgacgtgcggcaacgaaattgcgcgaaaccaccccaaacatgtgttttggacctaaagtagtggattgggcatgttcgttgtgaaaaacgaagaaatggttccagtggcaaaaacttgtgctttgtttgcaccccgacacccatttttggaatgtgtgacgtgcggcaacgaaattgcgtgaaaccaccccaaacatgagttttggacctaaagtagtggattgggcatgcttgttgcgaaaaacgaagaaatggttccattggcaaaaactcgtgctttgtatgcaccccgacacccgttttcagaatgggtgacgtgcggcaataaaattgcgcgaaaccactccaaacatgtgttttggacctaaagtagtggattgggcatgttcgttgcgaaaaacgaagatatggtttctgtggcaaaaactcgtgcttgtaagcaccccgacacccattttcagaatgggtgacgtgcggcaacgaaattgtgcgaaaccaccccaaacatgtgttttggacctaaagtattggattgggcaagttctgatagagctggagtgcccgatctttcggtgagtggagataattccgatttggtggaagtagaccctcacgatccgactacgacgagcgatcccgaagcgccaatgcaatcgctgaaccaactcctaatggttaccgaccttgctgctacgagattggcctgatcacgaagatcgtttcctgtgcgcaatcgaagaacgaacaagaaaaagatgcgagcaatcttaatatcactcgaggtggagttctgaatcacagaggacagcacgtatttgtgcgtgttctagggtagctaaagctagatctaaaacaaaactcgaaaaataaaggaggcgcagctcctggataaatagagagggggcgcagcccctaggggcggccaaccctaggtcgtccattatgggccgcagttgggctggtcgtctattcttccgggccttcgttctttaacagcatgatgtagttcaattctcttgcacgggcccgagtcactggcccaggtggaaggggtggcgcctggactagggtagatggtgcctgggctggagaaggtgctgctggtgtagatgtgctcgtgttggtgttgatgtcctcatcatcctccccttcttgaactgaagtcgtcctcgacggcaactcctcatcttctcccgcatacggtttcaaatctgcaacattaaaactagtggaaacaccaaactccgcaggtaggtcaaggatataagcattatcattaatcttggttagtatcttaaaaggaccagcagcacgaggcatcaatttagaacggccttcagg

SEQ ID NO: 689 - DNA, 7414 bp, Zea mays
  source (0)...(0): Zea mays BAC clone full insert sequence contig bacb.pk155.h15.fis26
ccgaaggcacgaacaaatctgcggtagaaaccggcaagtccaagaaagctccgaatttgtgtgaccgtcgtcggtgtaggccactcccgaatggcagcaatcttgctgctatccacctcaatgccctgcggagtaaccacataaccaagaaacgagacacgttgcgtgcaaaatgtgcacttttccatgttaccaaacaagcgagcagcacgcaaagcgtcaaaaacagcacgcaaatgttctaaatgctcctctatagacttgctgtaaataaggatatcatcgaaataaacaacaacaaacaaacctatgaaggcccgtagaacttcgttcattaaacgcataaaggtgctgggagcattagtcaatccaaagggcataaccaaccattcatataaaccaaatttcgttttaaaagccgttttccattcatcaccgagtttcattctaatctgatggtaaccgctacgcaaatcaaccttagagaaaataacggcaccactaagctcatctagcatatcatcaaggcgtggaataggatatcgataacgaactgtgatgttattaatagcacgacaatctacgcacatacgccatgacccatctttctttggaacgagtaaaacaggaaccgagcaagggctaagagactcacgaatgtaacccttatcaagcagtgtctgcacctggcgctggatctccttcgtctcatctggatttgtacggtacggggcgcggttcggaagagaagcgccggggatgagatcgatttgatgctcaatgccacggaggggaggaagacccggtggtaagtccgtaggataaacatcagcatactcctgcaaaaggttaacaacagcagggggtatatccaaagacggtgcatcatcaagcggaacaagcattcgcgagcatacaagtgcataacagggcatatgagcttcatggagatcatcaaaatcagcacgtgtagcaagtaaaacaggagagtgcaacttgatttcagatttaataggtgcggctgatgttgatttgacttgttgtgcagttttagcagccctagtaagatcatctttcaaaatttggtcaggggtcattggatgtataattattttctggcctttaaacatgaaagaataatgatttgaacgaccatgatgtaaactatcagtatcatattgccaaggtcgacctaataacaaagagcatgcttccataggaataacatcgcaatcagcataatcagaataagtacccaacgaaaaggggacacgtaccgaacgtgttacctttattttaccaccatcattaagccattgaatgtgatacggatgtggatgtgtgcgagtgggcaaggataatttctctaccaacgctgtacttgccaaattgttgcagctgccactatcgatgatgatgcgaatcgaccgttcgtgcacgacgcccttggtatggaatagagtgtgtcgctgatttttttcggcctgggcaacctgtgtgctgagaacacgctgcacaacaagactctcatacctatcggcgtcgataggatcaacgtggacttcctcattttctgcatggttagtggcaatcatagcatgactagtttcctcagaatcactggctgaagagtactcaccattgtcacgtataagcaaggtacgcttgtttgggcagtcccgaatcatgtgcccaaaccctctgcaacgatggcactgaatatcccgtgtacgtcctgtggaagaagcggcgcctttggcagggggcgccactggcttggccggccctgtgcgcgatgtagtgctaggcgtaggaggtgcagggctggaaggagttgagctgtgtgttggaccccggcctgcaaaagagttagtatatgtctttgatcgtcgtccctgcacttcacgttcagctttgcaagcatattcaaacaatgtggttatatcaaaataatccttataatcaagtatatcctgaatttccctgttcaaaccaccacgaaaacgcgccatagcagcgtcatctgactcaaccaaaccacaacgaagcatacccttttgcaactcctggtaatattcctcaacagattgtgaaccttgttgaaaacgctgcattttgttaagcaaatcacgagcataataggaaggaacaaatctgtggcgcatggcagtttttaattgggtccaagtaatgacactgttaatgggaagtttttgtttatactcacgccaccaaattaaagcaaaatcagtaaattcactaatggcagccttcacttggctattagcaggaatatcatggcatgaaaatttctgttctacctctaattcccaatcaagatatgcagcaggatcatatttaccattaaaagatggaattttaaatttaatcttagaaaataagtcattagggggatgacgaaccacacgacgtgcacgaccacggcgatctccatcgtcctgctcagtgtcaccgccgtattcctgctccatctttgtggtcaatgcatcaaggcgtgccaggatggtgtcgagtgtggtgcgagtcgccgtttgagcaaggtcaagttggttgaaacgctcggtcgtcgaagtgatcgttgaatcaagccgttcatgcatcgtcctaatgtcagcagcaagtccatcaacttgtccccttacttcctgcaactgggcatccaccatgtcgtgtgctcctgccatagttagcgcaaacaccaaaaggagaaaaaccaacgacaaaaacaggggtgtactgctcacaaggcgctcacactagtgctgttatcaagttcttatccgttcttaccaagccacagtggtgaactgcaaccaacaggtggaaccggtgaaagattggatgagcgattgcgtggagaaacagaaacctgctcgtcgtagaaatatgtggagttgtgggtaggctgcactcaagtcaaggattagcacgatcaaacaataatgcaaagttgaattatagtgcaaaacacgaaactatattgctggccacaggtgcaaaggatggatggatggaaatagcagaatggcagtaacgtaaatattgtactagtgatgccaaaaaggcactagtagaaatcacaggtgattttgtttttcttttttgtatgatttttttgatatttttctcagcacaagaagcaacaagataggagctacacgaagtttcacctaaaacagatatcagatgtggtctacagaaaatcaggaagttctctgaaaagcgtgcgagaactttgacgaatttttttctttattttcctgaatttttttgacaattttgtcgaaccccaaacagaccgtaggttagtttggccggcctcagaatggtgtcaactagctcctgtaaaaatttcagattttttggacacccgagcgaaaagttatgcccgatttacggaaggtacctcaagttatgttttaaaaacgactgggatgaaataacgtatcttctcttcgttctctttttttgtttctgttttttttatgtaaccgaaggagaaaaacaaggaagcggtcgttgactcggtttgttttttttctgttttttttcgtaaccgaaggagaaaatcaaggaaacggccgttgactcggtttgttttttctgttttctttttgatgtaaccgaaggagaaaaacaaggagacaatgttgactcgatttgtggcgtgatcaaacgggagatggtggcggcactagggtttgaatggtggaagaacacaatgcaaccagcaacaaatgacgcgaaagcacacaaattcaacaatgcagattattgaaagaaagtgcgaggctcaaaaggtgctgggataagatctaacctgaatttttatgtggttttgtggactgtaggaaaaaaacgctcgataaactcaccgatcaacctggaaatctgataccaattgatgtagctgaggtgcccgatctttcggcgagtagagataattccgatttggctgaagatgacccttgcgatccgactacgacgagcaagcccgaggcgccaatgcaatcgctgaaccaactccctgtggttaccgaccttgctgatgcgagatcggcctgatcacgaagatcgtttcctgtgcgcaatcgaagaacgaacaagaacaagatgcgagcagtctaatctattactcgagggtggagttctgaatacacgaagacagcgcagatttgcgcgtgttcgagagtagctaaggctaacgtaaaacaaaactcggaaaataaaggaggcgcagctcctgaataaatagagagggggcgcagcccctaggggcggccaaccctaggtcgtccattatgggccgcaattgggctggtcgtctattcttccgggccttcgttctttaacaacatgatgtagttcaattctcttgcacgggcccgagtcactggcccaggtggaaggggtggcgcctgggctggagaaggtgctgctggtgtagatgtgctcgcgttggtgttgatgtccgcatcacaaagcatatgttttggccatccgaaccatttcttcgtttttcgcaacgaacatgcccaatccacaactttaggtccaaaactcatgtttgcggtggtttcgcgcaatttcgttgccgcacgtcaccctttccgaaaacgggtgtcgatgtgcatacaaggcacgagtttttgccaccgtaaccatttcttcgtttttcgcaacgaacatgcccaatccaccactttaggtccaaagcacatgtttggggtggtttcgcgtgatttcattgccgcacgtcacccattccgaaaacgggtgtcggggtgcatacaagcacgagtttttgccacaggaacaatttcttcgtttttcgcaacgaacatgccaaatccagtatattaggtccaaatcttatatttggggtggttttgcgcaatttcgttgccgcacgtcacccattccaaaaatgggtgtcgggtgcatacaaagcacgagttttggcaccggaaccatttctttgtttttcgcaacgatcatgcccaatccacaactttaggtccaaaactcatgtttggggtggttttgcgcaatttcgttgccgcacgttaccctttccaaaaagggtgtcgatgtgcatacaaagcacgagtttttgccaccgtaaccatttcttcgtttttcgcaacgaacatgcccaatccacaactttaggttcaaaactatcgtttggggtggtatctcgcaatttggttgccgcacgttacccattccaaaaactggtgtcatggtgcatacaaagcacgagtttttgccaccagaactatttcttcgtttttcgcaacgaacatgtccaatccacaacttgaggtccaaactcatgtttgggatggttcacgcaatttcgttgctgcatgtcacccattcagaaaacgggtgtaggggtgcatacaaagcacgagttttggccaccggaaccatttcttcgtttttcgcaacgaacctgcccaatccactactttacgtccaaaactcatgtttggcgtggttttgcgcaattttgttgccgcacgtcacccattccgaaaacgggtgtcggggtgcatacaaagcacgagtttttgccaccagaaccatttcttcatttttcgtaacgaacatgcccaatccactactttaggtccaaaactcatgtttcgggtggtttcgcgcaatttcgttgccgcacgtcacccattccgaaaatgggtgttggtgcatacaaagcacgagttttggccaccggaaccatttcttcgtttttcgtaacgaacctgcccaatccactactttacatccaaaactcatgtttggggtggtttcgcacaatttcgttgccgcacgtcacccattccgaacatgggtgtcggggtgcatacaaagcacgagtttttgccaccggaaccgtttcttcgtttttcgcaacgaacatgccaaatccactacattagctccaaaacttaagtttggggggtggtttttgatgaagctgaggtgcccgatctttcggcgagtagagataattccgatttggcggaagatgacccttgcgatccgactacgacgagcaagcccgaggcgccaatgcaatcgctgaaccaactccctgtggttaccgaccttgctgatgcgagatcggcctgatcacgaagatcgtttcctgggcgcaatcgaagaacgaacaagaacaagatgcgagcaatctaatctattactcgagggtggagttctgaatacacgaagacagcgcagatttgcgcgtgttcgagagtagctaaggctaacgtaaaacaaaactcaggaaataaaggaggcgcagctcctgaataaatagagagggggcgcagcccctagggggcggccaaccctaggtcgtccattatgggccgcaattgggctggtcgtctattcttccgggccttcgttctttaacaacatgatgtagttcaattctcttgcacgggcccgagtcactggcccaggtggaaggggtggcgcctgggctggagaaggtgctgctggtgtagatgtgctcgtgttggtgttgatgtccgcatcatcctccccttcttgaactgaagtcgtcctcgacggcaactcctcatcttctcccacatacggtttcaaatctgcaacattaaaactagtggaaacaccaaactccgcaggtaggtcgagggtataagcattatcattaatcttggttagtatcttaaaaggaccagcagcacgaggcatcaatttagaacggcgcaaagtaggaaaacgatcctttctcaaatgcaaccaaaccatatcaccaggttcaaaagtaacatgttttcttcctttactaccagcaacctgattttttgtattagtagcagcaatgttctgtttcgtttgttcatgtatggtaatcatttgttcaacatgtgcagaagcatctacatgtggggcgttcgcagcattaagtgaaatcaaatcaataggtgccctaggaatgtaaccataaacaatctggaaagggcacatctttgtagaagaatgcgtggcatgattgtaagcaaattcaacatgaggcaagcaatcctcccaacgtctcaaattcttgtctaaaacagccctaagcatggtagataaagttctatttactacctcagtttgtccatcagtctgagggtgacaagtagtgctaaacaacaatttagttcccaatttattccaaagagatctccaaaaatggcttagaaacttagcatcgcgatcagagactattgtttttggaataccatgtaaacgaataatttctctaaagaacaattcagcaacaatgctagcatcatcagttttatgacaaggtataaagtgagccattttagagaatctatcaacaaccacaaaaaatactatcctt

SEQ ID NO: 690 - DNA, 4394 bp, Zea mays
  source (0)...(0): Zea mays BAC clone full insert sequence contig bacb.pk155.h15.fis27
gggaacctgtataaattatgccacaagcaaggctgagtatactaatactcagctagacttacccggtgtgaggagtctactcctctacctctagacatgcagctgtttggctgtggggtttggttgccaaaagcactagctgagtttctaaatcaagattttaacttaatcaaagttaagtgtgactctcttaaggctaaaagtggactatctactcatacatggtagcaagcatcattaacagtcaacatcttatctcaactcatcatacttccacttattactcaatgcagtacaatggatcaagcagtctcattagctgcgagaagcagacgattcgaatcgagtttttatccttgcaaggtaaacctaaacacacgacatgtaggggcactccgtccccacacacatcaaccgtccccatcgattccctggcaacagatcaaggctcaccgccttggcgtacaatgccccactgaccccgactggccgacgtgcagtgaccgcacttgtacccaccataaccggaatgggagacctcgtctcaggtcgcgtgaggggatatgtctgcgggcaggttcactcaggtactaggcttaccgatttaccatatttctcggtatgtgtttagtacattcaaacgcttgacacaggtatccgcacgttaatccttattccattttccatctcgtaaacaaccaatccccatggattgttgtccaccaactagtatcatgatagtgtgaaagtgggtacaatcaatttcctgatctcgcgcgagtgctagaaaaatcactcgtcttctaccaagatcctatttaattaaagcaactactcgacctgtcatactagtattcatttcaaaaggattcctgagatcatgcaactagggtttcaaacaattcctacacctaagtgcacaatcaatcctacaatcattaagtgaagtaaaatagcataaataacaggttatgcataaaaccggggcttgccttccaaagcagtggcaggcaggtcctctggtgctggctctggtgctggatctggggcaacctcctgggcagctccttgctccggcacgaggatgtactctccgtccgcaagattacagtctatcaaaatgcaatgaacatgtatgtcatgattatgcaagatttaagaacattaagttaaagaaactaagttaagaattaacttagggtttcctggttctgtggggcttctagtggtatacatagactttgacttattaccctttaagcttaggtttggctttaggataacatagtagaatttgtattgtcttgatacactctagtggacagagtacaaggttttggaaatcattatttcacatttttcattttcctttatttaattttccatttagggtttctaaggtaggtttgaactacatcatggttttaataatttctaaaaattctgtaaaaattatagtgggttgtcactggctattttagcttgttttaagaatttgaggcttaaggtataaaagttaggccttaaacaaaaataacaaaagttaggcaaaaaggggcactttacactacacctcctagttaggggtaggctctgtcctaaaggttatttttgttgacatcctctggtaataataggtctttgtgctaaaaaccacaggaaactaaggggtggttaattagctatgattttcccaagtttaatgtcaaaaaggcactttctacttccttattatttgaaaaatgtcaaacagcagatttcatatttttcttaggttctttctaataaaacaatagtgatcccaagggtgggggtgttttcaccttggggttatttttgtggagtttttctaatttatccttgttttattaatttaaaagagatcttaattattttacactaaaacagggtatgatatatttttctagtgaactacattaactaagtatcttaacaaaaataggggtgccctctggttcaatatttgtgtcacttttcctatttttcttaaacttaagcatatttggaataaggggttaaaactaacttaatgtaatggatagaggggtttaacatttttaaacaggttagtaggtgaatataaacttctccaaattttcctaaccttagtcaaatagcctaactatttttcttactattatttagcttttggccaaagttaacattaaatcagaacttttaagttttccaccgtaccaaggggttttatatttttcctaaataggttacatgatttagagtctggcaaaattggtttgaccaaaattggataaaccaaacagaagttatgggtttttaaagtttctgtttgaatttaaattaggttttaattaagttttcctggaaaaacagtttgcgccgaggtccctgggtttaaaacaattcaaacctcgcagatctacccttaaggcactattcacttgagtctctgacctttcacttaaccccctgggtttctctccctctcacccgcagtccctccctcaactgaaacagtagccgcgggaaagaaaagggtggcgcggcttaccggcggcgagggaggtccggcgaagggtaggattggctcggagggtctggcgatcacgtcgaggtacggctcgtcgtcggggatggccggaatcgcccggtccacgtgagcaggcgggcgagctcgtcggcggcgcgtgctccggcctatccacagcggcatagttcaatccaagggcatagggagcttcgtggaggtctaaggagtctaaccgtgcaaggaatcgaagagaggcgcacggtgtacctcggtccacagttgccggcggtcggttgaagtccggtgaccttgggccggcctctccgttgaagcagagcccgattcctcgctcggggagcttcacggagacgtgcacagtcttctccgggggctggacggggttgggaatggctgggctggccggtctacggtggcaggggctcgggtggccgcgggcacgtcgcgtatgggcaaacggcggcgaactgagctccggtgaggcttgagcgcgtgcggaggggtacggccaaggctcctgggcgttttatagtcgcggacgcggaccagggcactggcttggcttgggcgcggcgcgggcgcgcgcgcgggcgtgctctggcgcggcagacggcgtcgaacacgtggcggtttgtttcttccagtgttcaaatgtcgccagaggtcgcaaacgtgcgaatctttgcaaaagtccggcgcagacctcttcctggcacctagggctgtcactcaactgtgagacgccggggcagatacggcctagggagggagatcttcgggtgccaaaacaggtgtgtcatactgagcatatcacgacaaaagccatgccatggcatgtcaaacgtccgagtctcgagctcaactttttccagtgggtgccctaagtggtattgcacatttttggtatagaacccaagtggttttggtgccatttttaaagtgaacacggttgatctttgatttagggctaaaatgggacttagagggaattagagagctctagctctctctccacttggagatttgaaatggggtttccctaggggcctttttgtaatatttccctcccctaattgatggttataatgttgcttagggtttgggtaaaaattacccatgttttgcacatttgctcactctctttcccctcttatccatggttttgggagatagggtttaagagaggcctagggttctttccccctctcccaaggtgatagttgcacacaattagggtaatgcctttggtcattcccaactcttggtaaaaacttagtttccaaagccccttatacttttgctccttaagttcttccacatgtgatcatagtcttgagtgccaaggtgtgctccagccatggcaacacctggggtgttacagccctccccccttaaaggaatctcgtcccgagatttgaggtagagtcccttggagggtgctggaaggtgtgttggtgctactctttctttatactcaagtttctcttgttaactgctcttcgaatgtcattctctttgcaacttcagaaggaagcccttcttaagttgaattcccaacttagactattcttgctatcttagtttcccttataattgatttcaaagggcaggtgggggggttctgtggttacataccgactcttttgggtagaaagtcggggaagcgagagcgtagaaaatcctcagtctcccatgtagcttcttctgttgaatggtgactccactgaaccttatacattcttactgtccttgcccgagttgatctatccttttgatctaataccttgacggggtactcttggtaggataaatctggttctatctcaatgtctaggagccgggagta

SEQ ID NO: 691 - DNA, 6255 bp, Zea mays
  source (0)...(0): Zea mays BAC clone full insert sequence contig bacb.pk155.h15.fis28
ccgaatcctgattttgctttaatttggtggcgtgagtataaataaaaacttcccattaacagtgtcattacttggacccaattaaaaactgccatgcgccacagatttgttccttcctattatgctcgtgatttgcttaacaaaatgcagcgttttcaacaaggttcacagtctgttgaggaatattaccaggagttacaaaagggtatgcttcgttgtggtttggttgagtcggatgacgctgctatggcgcgttttcgtggtggtttgaacagggaaattcaggatatacttgattataaggattattttgatataaccacattgtttgaatatgcttgcaaagctgaacgtgaagtgcagggacgacgatcaaagacatatactaactcttttgcaggccggggtccaacacacagctcaactccttccagccctgtaccttctacgcctagcactacatcgcgcacagggacgaccaagccagtggcaccccctgccaaaggcgccgcttcttccacaggacgtacatgggatattcagtgccatcgttgcagagggtttgggcatatgattcgggactgcccaaacaagcgtaccttgcttatacgtgacaatggtgagtactcttcagctagtgattctgaggaaactagtcatgctatgattgccactaaccatgcagcaaatgaggaagtccacgttgatcccatcgacgccgataggtatgagagtcttgttgtgcagcgtgttctcagcacacaggttgcccaggccgaaaaaaatcagcgacacactctattccataccagagacgtcgtgcacgaacggtcgattcgcatcatcatcgatagtggcagctgcaacaatttggcaagtacagcgttggtagagaaattatccttgcccactcgcacacatccacatccgtatcacattcaatggcttaatgatggtggtaaaataaaggtaacacgttcggtacgtgtccccttttcgctgggttcttattctgattatgctgattgcgatgttattcctatggaagcatgctctttgttattgggtcgaccttggcaatatgatactgatagtttacatcatggtcgttcaaatcattattctttcatgtttaaaggccagaaaataattatacatccaatgacccctgaccaaattttgaaagatgatcttactagggctgctaaaactgcacaacaagtcaaatcgacatcagccgcacctactaaatctgaaatcaagttgcactctcatgttttacttgctacacgtgctgattttgatgatctccatgaagctcatatgccctgttatgcacttgtatgctcgcgcatgcttgttccgcttgatgatgcaccgtctttggatataccccctgctgttgttaaccttttgcaggagtatgctgatgtttatcctacggacttaccaccgggtcttcctcccctccgtggcattgagcatcagatcgatctcatccccagcgcttctcttccgaaccgcgccccgtaccgtacaaatccagaggagacgaaggagatccagcgccaggtgcagacgctgcttgataagggttacattcgtgagtctcttagcccttgctcggttcctgttttactcgttccaaagaaagatgggtcatggcgtatgtgcgtagattgtcgtgctattaataacatcacagttcgttatcgatatcctattccacgccttgatgatatgttagatgagcttagtggtgccgttattttctctaaggttgatttgcgtagcggttaccatcagattagaatgaaactcggtgatgaatggaaaacggcttttaaaacgaaatttggtttatatgaatggttggttatgccatttggattgactaatgctcccagcacctttatgcgtttaatgaacgaagttctacgggccttcataggtttgtttgttgttgtttatttcgatgatatccttatttacagcaagtctatagaggagcatttagaacatttgctcgcttgtttggtaacatggaaaagtgcacattttgcacgcaacgtgtctcgtttcttggttatgtggttactccacagggcattgaggtggatagcagcaagattgctgccattcgagagtggcctacaccgacgacggtcacacaaattcggagctttcttggacttgccggtttctaccgcagatttgttcgtgattttagctccattgcagcgcctctacatgagcttacaaagaaagatgtgccgtttgcttggagtgattcgcaggaggtagcgttcaccactttgaaagataagttaacccaagctcccctcttgcaattgcctgattttaataaagtttttgagcttgaatgcgatgctagcggtattgggctaggtgctgttttgttacaagaaggaaaaccagttgcttattttagtgaaaaattaagcggtgctagtctgaaatattctacttatgataaggagctttacgctttagtgcgcactttgcatacatggcagcactatctttggcatcgtgagttcataattcattctgatcatgaggctttaaaacatattcgtacccaaacaaatctgaaccgtcgtcatgctaaatgggtcgaattcattgagtcctttccttacattattaaacacaagaacgggaaggacaatgttattgctgatgctttgtctcgtcgctataccatgctgtcacaattagattttaaaatctttggtttggacactgtgaaggatcaatatgttgacgatgctgattttaaagatgctttcggccattgtattaatgggataccatggggcaaatttcacatacaggatgggttcctgtttcgcgctaacaagctgtgtgttccagctagttcggttcgtcttttgttgttacaggaggcgcatggaggcggtctcatggggcattttggcgtctacaaaacgcatgaggtgttggctgcccacttcttttggcctcggatgcgcgctgatgttgagcgccttgttgcacgctgcactacttgtcagaaagctaagtcacggttgaacaaccatggtttgtatatgcctttgcctgtcccttcttctccttggcttgatatctctatggactttgttttgggcttgcctagaactaagaaggggagggatagtatttttgtggttgttgatagattctctaaaatggctcactttataccttgtcataaaactgatgatgctagcattgttgttgaattgttctttagagaaattattcgtttacatggtattccaaaaacaatagtctctgatcgcgatgctaagtttctaagccatttttggagatctctttggaataaattgggaactaaattgttgtttagcactacttgtcaccctcagactgatggacaaactgaggtagtaaatagaactttatctaccatgcttagggctgttttagacaagaatttgagacgttgggaggattgcttgcctcatgttgaatttgcttacaatcatgccacgcattcttctacaaagatgtgccctttccagattgtttatggttacatccctagggcacctattgatttgatttcgcttaatgctgcaaacgccccacatgtagatgctgctgcacatgttgaacaaatgattaccatacatgaacaaacgaaacagaacattgctgctactaatgcaaaaaatcaggttgctggtagtaaaggaagaaaacatgttacttttgagccaggtgatatggtttggttgcacttgagaaaggatcggtttcctactttgcgccgttctaaattaatgcctcgtgctgctggtccttttaaggtgctaacaaagattaatgataatgcttatatccttgacctgcctgcagaatttggtgtttccactagttttaatgttgcagatttgaaaccatatatggccgaggatgaggagttgtcgtcgaggacgacttcacttcaagaaggggaggatgatgagcacatcactatgagtacgactacaccagcagcacctccacatcaagcgccacttccttcattagctgggccaatcactcgggcccgtgccagagatcttaacttcgtcatgctactgaagaatgagggcccagaaaaatagacgaccagcccaactgcggcccatagtggacgacctagggttggccgcccctaggggctgcgccccctctatttatccaggagctgcgcctcctttattctcgagttttgttttacgttagccttagctactctcgaacgcgcgcaaatctgcgctgtcttcgtgtattcagaactccaccctcgagtaatagattagattgctcgcatctttttcttgttcgttcttcgattgcgcacaggaaacgatcttcgtgatcaggccgatctcgcatcagcaaggtcggtaaccacagggagttggttcagcgattgcattggcgcctcgggcttgctcgtcgtagtcggatcgcaagggtcatcatccgccaaatcggaattatctctactcgccgaaagatcgggcacctcagcttcatcaagcttccacatcacccaacctaggacgcagaccggccacgtcaacaggaggcgccatcatcaccctaccccgagctgactcgggccgcagggaacaagaccggcgtcccatctggctcgctccgccagacaggcaatgatggcgtcccgcatactctgtgacgacggcggctctcagcccccttacggaagcaagaggacgtcagcaaggactcaatcgctccgacagttgtccctccgccaggctccatcgctcctccgacggccacgacatcacaccagctgggtgccaaaatctctccggctgccacaacggcgtgtacttagggcgctagctctcctccgctagacatgtagcactctgctacacccccattgtacacctggatcctctccttacgcctataaaaggaaggaccagggccctcttagagggggttggccgcgcggggacgaggacgagacaggcgctcgcttgaagccgctcgctccctctcccgcgtggacgcttgtaaccccctactgcaagcgcacccgacctgggcgcgggacgaacacggaggccgcgggattcccagctctctcacgccggtctccggccgcctcgatctccccccttcgcgctcgccctcgcgctcgacccatctgggctggggcacgcggcgacattcactcgtctgcccagggaccctccggtctcgaaacgccgacaatttgttatcatgtatgatcgactatgcattgtggttgctaattaatttaaaatctctctagttatctatgtgtgctattaaaattcatttaaattgtatttgcatattttgttaaaaattaaatattaattcatttaaattgtatttgcatatttctgttaaaaattaaaatattaattcatttaaattttattttcatatttctgttaaaaattaaaatattaatatggtaatcaaatcacaatcacagacggtttttcattagggtccgtttgtgaaaagaatagagcaccacaggcggtcctaaaaaaaccgcttgtgatactaatacatcacatgcggttcgaatagcctgcgatatcctagacggttttctaatcgaaccgcctgtgatgtaaaaagcctaccgcttgtatagagccaaattgtactagtgtttagactgaggtccatcagcggacgagcacaaccgacctatggcctcaggactctggggccctttggaatgctggatttttttccaatttcctatgcttttcttgtgaaaattaattgattcatgtaaaatttctgtattatttctctgaaattcctatgttccaaaggatctcttagacggcagccgactacatgtggaaggacattggctcgttatttgtgattgtcgtgaagacgaatgaagacattggacataggacatggcagttttaagggcttgtttggatgtactaaaattgctagtgtagttagttgacgaactagtaggtggctaactaataactaatagttagttggacgcttagctagggtgtttaaatgcctccacctaaaagcatctaataactaaaatgttacatagattgtttagatgtctctaactaattttagcagctaactattacctctaatgcatttaaatacgatctaaatatgatggcaaatttagatagacttatacctcgg

SEQ ID NO: 692 - DNA, 7238 bp, Zea mays
  source (0)...(0): Zea mays BAC clone full insert sequence contig bacb.pk155.h15.fis29
gaagcagctggctcaacgtcagccaccaccccagcattatggtggtggagaccaccagcgtcaccccgcggtggccactatcaggaattcctcagcacccagcctccactgttcacaagggcggaagacccacttgacgcagatgtatggctgcgagtggtggaatccaaattcccactgctccatggagtttgctcagaggtcaccaaagtcaggttcgccacccagcagcttcgcggacctgcaaggacttggtgggatcattttcttgctatgcagccagaggaccgagaggtggagtggagggagtttaaggcagcttttagaggacaccatataccagccgggatcatggacaggaaactcaatgagttcttggcactcactcagggcaacaggacagtgttgcagtatgcccaggcctttaatgacttgtgccagtatgcgggatatcatgcggatacagatgagaagaagagggacagattcagaagggggctcagcactaagctccgggatcgtctcaacgccgtcagggccaacagctacaatgagttagtcaacatggccatctcccaagaggactgcattaccactaggcaggcagagaagaaaaggaagacccctgtggcaggaccctcagctcagccacagcgtttccggattgtgtccgacccccagggaaggggaccccagcagcagcaagggcgatgggtaattcgacctcagcagcagcagcagcaggcacccaaccgcaatcaatttccagcacagcggaatagtcagcagcagcagtaccgccaagccaatgacaacaggtgcttcacttgtggcaacactgggcattatgccaagaattgccccaggaaccagcagaggcaggggcagaatgcaaatcagaaccaaggcaagaggcagaaggtgcaagtgaggcagggcaggctgaacttcaccaccatggctgacattccagagggagcacccgtcatgactggtatctttacagtattaaattttcctgctattgttctttttgattccggtgcttcgcatagttttatcagtgcaaggtttagtgccaagtgccagttgccctttcaccacaccaatgggggcattacaatttcgaccccaggaggcagggttgccacctaccaaattaacaagaatgtgcctataaagtttggtagtctgataattaaagccaaccttctcattctgggtttggagagtgtggatattatattgggaactgactggttgacaaggaatcaggctgtgatggatattgcggctagagccattgaggtgcactcaccaacttgtggtgagaccacactgtatttgcctgaccagggatacacccgttcttgtgcctttgttatgatagaatccccagtggaaaagatcccagtggtctgtgactatccagatgtttttccggatgaattgccacgaatgccacctgaccgagacattgagttcgcaattgagttgcaacccgggactgctccgatctccaagagaccctatcggatgcctcccgcggaattggcagaattgaagaagcaactgcaagagttgttggacaagggatttattcgtccaagcacttcaccatggggatgtccagcattatttgtgaagaaaaaggatgagagtttgaggatgtgtgtggactaccgccctctcaatgcggtgaccataaagaacaaatacccgttgcctcgcattgatgttctgtttgatcagttggttggagccaaggtattctccaagatagaccttcgctcaagataccatcagatcaagatccgcgctagtgatattcccaagacggctttctctaccagatatggactgtatgagtttctggtgatgtcttttgggctgaccaatgccccggcttattttatgtatttgatgaactcagtattcatgccagagttagacaagttcgtggtcgttttcattgatgatatactggtttattccaagaacgaagccgagcacactaaacacttgcatactgtacttcagagactgcgtgatcatcagctgtatgctaagctgagtaagtgtgagttttggctgaaggagatcaaattcttgggtcataccatttctcaggatggggtatcagttgatcctgagaaggtgcaagaagtgatggattggaaacccccgaccacagtaaagcaaattcggagttttctgggattggcagggtactatcgacgatttattccggatttctccagaattgccaaaccaatgactgaactgttaaagaagggagtcaaatttgagtggagccaaaagtgtgaaggtgcattccataccttgaggcagcatttgacaacagccccagtgctggctcaacctgacaataccaagccatttgaagtttattgtgatgcttctggtactggtttgggatgtgtcttgatgcaaaagagcagagtgattgcttatgcttcccgggcactcaggccccatgagcagaactaccctacacatgatctagagttggcagctgtagttcatgctcttaagatttggagacactacctgatgggagctcactgtaacatctacactgatcacaagagtctcaaatacatcttcacccaggcagatctgaacatgaggcaaaggagatggttagagttgatcaaggactatgatctagaggtgcattaccaccctggtaaggccaatgttgtggcagatgccttaagcagaaaagcccagtgtaattgtatgagcatggatgtgggagttaccaccctgtgtgatgaattgtgcaaactgaacctggaagttgtttcttcgagtaacctaagctatatctcggtggaacccacattgcaagagcaaatagttcaggcacagcttggggataagggagttcaggttatcaaggatatgatcaaacaaaaggcagagaaatacaagtgtttccgacaggacagtaagggaattctatggtttggagatcgattggttgttcccaaggaccctgagcttagaaagaagatactggacgaagctcacctttccaaattctccatgcaccctggtagcaacaagatgtatcatgatctcagatctctatattggtggactagaatgaaaagggaaattgccaaatacatatccgaatgtgacacctgccagagaattaaggctagtcacttgaaggcagcaggccatttgcaaccccttcccataccatcttggaaatgggaggacatttgcatggacttcatagtgggattacccaatacctccaggcaccatgattctatttgggttatcgtggacagattgaccaagactgctcatttcttgcccctgcacaccacccacaagaccgagaagtatgctgagatttatgttgatcagatagtgagattgcatggtattcccaagaccattatatctgacagaggagcactgtttgtggcacgcttttgggagaaactgcaagaatcacttgggacccatgtcatccgaagctcagcataccacccacaaacagatggccagatagaaagggtgaatcaaattttggaagatatgttgcgagcctgtgcactacattatggaaaggaatgggacaagtgtctgtctttggcagagttctcttacaacaatagctatcagtccagtctgaagatggcaccttttgaggcattgtatgggagaaggtgtaggaccccactgaattggtctcaagcaggagaaagggaaatttttgggccagacttagtactcgaggcagaggcaaaggtcagggtcattaccaagaacttggaagctgctcaggctaggcaaaggagctatcatgataagaggcggaaacctctacagtttgaggtgggagatcatgtctatcttaaggtatcccccaccaagggtgttcagagattcgggatcaagggcaagttagcccctcgctacattggaccctatgagatcaaggcaagttgtggacccgtagcttaccaattggaattgccacctcacatgtcagcagtgcataatgtgttccatgtatctcagctacggaaatgtgttcgtctacccactgaagtactcccggaaccagacattgagatagaaccagatttatcctaccaagagtaccccgtcaaggtattagatcaaaaggagagatcaactcgggcaaggacagtaagaatgtataaggttcagtggagtcaccattcaacagaagaagctacatgggagactgaggattttctacgctctcgcttccccgactttctacccaaaagagtcggtatgtaaccacagaacccccccacctgccctttgaaatcaattataagggaaactaagatagcaagaatagtctaagttgggaattcaacttaagaagggcttccttctgaagttgcaaagagaatgacattcgaagagcagttaacaagagaaacttgagtataaagaaagagtagcaccaacacaccttccagcaccctccaagggactctacctcaaatctcgggacgagattcctttaaggggggagggctgtaacaccccaggtgttgccatggctggagcacaccttggcactcaagactatgatcacatgtgaaagaacttaaggagcaaaagtataaggggctttggaaactaagtttttaccaagagttgggaatgaccaaaggcattaccctaattgtgtgcaactatcaccttgggagagggggaaagaaccctaggcctctcttaaaccctatctcccaaaaccatggataagaggggaaagagagtgagcaaatgtgcaaaacatgggtaatttttacccaaaccctaagcaacattataaccatcaattaggggagggaaatattacaaaaaggcccctagggaaaccccatttcaaatctccaagtggagagagagctagagctctctaattccctctaagtcccattttagccctaaatcaaagatcaaccgtgttcactttaaaaatggcgccaaaaccacttgggttctataccaaaaatgtgcaataccacttagggcacccactggaaaaagttgagctcgagactcggacgtttgacatgccatggcatggcttttgtcgtgatatgctcagtatgacacacctgttttggcacccgaagatctccctccctaggccgtatctgccccggcgtctcacagttgagtgacagccctaggtgccaggaagaggtctgcgccggacttttgcaaagattcgcacgtttgcgacctctggcgacatttgaacactggaagaaacaaaccgccacgtgttcgacgccgtctgccgcgccagagcacgcccgcgcgcgcgcccgcgccgcgcccaagccaagccagtgccctggtccacgtccgcgactataaaacgcccaggagccttggccgtacccctccgcacgcgctcaagcctcaccggagctcagttcgccgccgtttgcccatacgcgacgtgcccgcggccacccgagcccctgccaccgtagaccggccagcccagccattcccaaccccgtccagcccccggagaagactgtgcacgtctccgtgaagctccccgagcgaggaatcgggctctgcttcaccggagaggccggcccaaggtcaccggacttcaaccgaccgccggcaactgtggaccgaggtacaccgtgcgcctctcttcgattccttgcacggttagactccttagacctccacgaagctccctatgcccttggattgaactatgccgccgtggataggccggagcacgcgccgccgacgagctcgcccgactgctcatgtggaccgggcgattccggccatccccgacgacgagccgtacctcgacgtgatcgccagaccctccccgagccaaccctacccttcgccggacctccctcgccgccggtaagccgcgccacccttttctttcccgcggctactgtttcagttgagggagggactgcgggtgagagggagagaaacccagggggttaagtgaaaggtcagagactcaagtgaatagtgccttaagggtagatctgcgaggtttgaattgttttaaacccagggacctcggcgcaaactgtttttccaggaaaacttaattaaaacctaatttaaattcaaacagaaactttaaaaacccataacttctgtttggtttatccaattttggtcaaaccaattttgccagactctaaatcatgtaacctatttaggaaaaatataaaaccccttggtacggtggaaaacttaaaagttctgatttaatgttaactttggccaaaagctaaataatagtaagaaaaatagttaggctatttgactaaggttaggaaaatttggagaagtttatattcacctactaacctgtttaaaaatgttaaacccctctatccattacattaagttagttttaaccccttattccaaatatgcttaagtttaagaaaaataggaaaagtgacacaaatattgaaccagagggcacccctatttttgttaagatacttagttaatgtagttcactagaaaaatatatcataccctgttttagtgtaaaataattaagatctcttttaaattaataaaacaaggataacttagaaaaactccacaaaaataaccccaaggtgaaaacacccccacccttgggatcactgttgttttattagaaagaacctaagaaaaatatgaaatctgctgtttgacatttttcaaataataaggaagtagaaagtgcctttttgacattaaacttgggaaaatcatagctaattaaccaccccttagtttcctatggtttttagcacaaagacctattattaccagaggatgtcaacaaaaataacctttaggacagagcctacccctaactaggaggtgtagtgtaaagtgcccctttttgcctaacttttgttatttttgtttaaggcctaacttttataccttaagcctcaaattcttaaaacaagctaaaatagccagtgacaacccactgtaatttttacagaatttttagaaattattaaaaccatgatgtagttcaaacctaccttagaaaccctaaatggaaaattaaataaaggaaaatgaaaaatgtgaaataatgatttccaaaaccttgtactctgtccactagagtgtatcaagacaatacaaattctactgtgtatcctaaagccaaaccttatgcttgg

SEQ ID NO: 693 - DNA, 7481 bp, Zea mays
  source (0)...(0): Zea mays BAC clone full insert sequence contig bacb.pk155.h15.fis30
ccgaaaacccacgttttctgtttgtgctcgaagcattaaggatcccagcatcctcatcgttccacagaatcctagcagcgtctggcttttctattagtagcttggctactaggaacccagcaatagaccacgtttggtacagccgcgactgtttcccaatgaatcgtgctctcttggtgtcgtagtactccggccatttgtcagtagcgattcgcctctcagctacttctatagctttggcagcaagttctggtctgttcatcttgatgcatgccactgtgagctgcacaaaatggttgccactgctcaacaacattcaatgtgcgcatcataaaggagaagtgcaaaatgcgagcgaacagattgccagtaaatctcagcaagtttggctaaatgcagcagtgtgtcaaaatgacaccatgccttgcatgcggacagataaaaaccaattcaacagcaagacacagtaaatctacagaaataggaaaccagtttagagaatgcaaacctgccacagtaatgttggccaggatcctccattgtggtatgaccaaggcctgtacgaaaaagaaattgccaagcatgtaaaaaggaactgcaacatgatcccaggtagagggtaaaaattgaaaaaacatctaaggctcacgtgtttttagggtcactcccagtgatgattttccattcctggttttcaagagcaggatagcatatctttagtggcatctctgcaactaaatcagaccatttagactcaataaggtctaaaatggcatgcgactgatgagttgttgccaagctgcttactattgaccataaatttcccagtgaaaagaatcggaagtccatatgagctggctggaggtttccaataaagtaaccacccttaggaggtatccactcaacaagccatggagaaatctgatcagggtaaatgttgaacttgttgacagcatcataagaatattcttctgttttatatcgatatatctcattcaatttttgcatgtcaagccaatagtactctctgatatgaaaggacagtgcaataagtctattgttcagggcacggattaagtcagctgatccatcttcttgagtcaacatctcacgcgcacacaagagggctgaatagaagagtgcctacacacaaaacaatgtgcatgagctaacttatcatgtacagaaaaaatgtgtgcctcttttttctttttcttttttgagaccatggagcttggattgagttttgcatggttattgtccttgtaaacttgtgtctgtcctaatcacaaatgttgtctgcattagtttattctctgcagtaccatcctcactgctactaatgatcaacttgtctatccatgccaatcaatccaaaaagctcactgcttcaggccattttccaatacaaattcatcccctatataaaacccccgatagtatccatgttttattgcaagtttgcaacagactttgaacatattgcaacaggctttgaacattagattgttttcatttagattacaagcgcaagtgatgttaacttttaggtggaaaatgcttacatcagctcaggattagaactgttggaactgtattagggtttgggtacatttactctcttgcccctctgtaatgggccaggcctaactccaaatggctattaatacacaggccaccctatcctaaggttaggttttgcatattcctacatggtactagagccacacaaacttcctccctcccctagccggccgccagcccctggccgccgccgctgcccctttccccatccccctccggccaccgccagatcgcctccatcccctctctccttcctggtcgccggccgcacccgcttctcccccttctccggtcgacgtcttcctcctccccccggccggcgagctcgggctcaaccgcgtcgtcgaccatccggccgcgctcacctctccctcccccagccggcgagctcgggctccaccgcgccccgaccagctagcgtgctcggtggccgcggcaccgcccaccacatccgcgccctcccctcgcgcgcggccacatcgtccgactgaagcagcaggcgcgtgcggctgcgcgtggcgctgtcggccacgagcgccttggaccgttgcaaccgccggagcgccgactcgctgctcttgcttcctctctgccccgcccccagcacctacagagcccgccgatccctgccccggccgccgaatcttcgtcgtccaccgccggccgccatctggcccctctcctgctgcgctgggccccggcgccgtgcccgctcttcccaagccgtgccgcaagtgggtcggcctcgccggagcagcctgcccccctgcgctccctcctgtcgtgccgcagtgggttggcctggccggagcagcagtcgtggccgtacagcccgctcaccccctgtgcgccctgcttctgtgacacagtggacatcctcgccctcggctttgctgcgccggttgagctccgtcccggttccatggcgtccccaccaccacacatgagctttgcctcgcccgctgctcccgtggctcctgactaccacggtcgtgcttttgccctggccgtcggcgccacttcttgtctccgcccgtttccgtcgggatggctgtgcgcgtccttctcaacgatggccagctcgtccggggcaccttcgtgagcttcgatcccaccatgagccctgtcctttgtgactgcgtcgaactccacccccaggccgaccgtcacgtgcctagaccccttgtcttccctcgtgcagtgatcgcctccctggccattgagccctcgttccctccctcccctcccagtaaccacgtcagagctcatcctctggtctctccgtgcaccctatggcctccccactgtctccctctcccaccgattgggtggtcgactccggggcctccttccacaccactcccacaactagttcgttattccactcccatccaccacacccctcacatccttcctccattgtcgtaggcaacggttccactcttccggtcacatcagtaggtgcatcagttcttcctggaccattctgccttaacgacgtccttgttgctcccggtctgactcatcccctcctctcggttcgtcgcttcactagtgacaaccactgctttatggagttcgacccctgggatctcaccatacgccaccttcccacacatgttgtgctcgctcgctgtgacagctccggtcccctctattctcttcacttgccctccacttcccccaccagaatagcctcatctcctgcacttactactaccaccacatcacatgctcttgctactaccaccacctcctccgccatttggcactgttgcctcgggcaccctggacctgacgtcatgtcccaactctccagccactcagacatatcctatactcgaggctcttctgagcacctctatcatgcttgtcagctcggccgtcactctcgtcttcctttttccacttccacgtccagggttgttcaggcctttgatcttgtccactgtgatctctggacgtctcctgtccttagcctctccggctacaaatactacctggtcattctggacgactactcccattttctttggactttcccccttcggttgaagtccgacacgtttaccaccctcactcacttcttcgcctgggtatccacccagtttcagcgcccggttcgtgctttgcattgcgacaacggccgcgatttcgataaccacgcctctcggtcattcttcctcaccagtggcgttcagctgcgtctctcgtgcccctacacctccgcccagaacggtcgggcagagcgcatgattcgcaccaccaccaacatgatccgctgccttctcttccaggcgtctctccctgccagctactgggcagaagccctacacaccgccacccacctcctcaactgtcttccctccaaggcggtgagccaccctactccctacttcgccctgtacggcacagcccccacctacgaccaccttcgcgtgttcggttgtgcctgctaccctaacacttctgctactgcccctcataagctttctcctcgctccacccactgcctcttccttggctactcatctgaccataagggatatcggtgtctggacctcacctcccaccgcatcatcatctctcgtcacgtcgtctttgatgaggatgtgtttccccttgttggcccctccccgcctaccgatctcgactccctcctcgagtccgatccagtctccccctcctcccaggcgccccgccttgcgtcgttacccgcaccccatgcggcctcgacgccgcggctcgcacatattcccacgccacgcgtggccccgtcgatcacgcctgcgccacgcgcggccccgacgaccacgcatgtgccacgtgcggccccgtcgaccacgcctgcgccatgcgcgaccccgtcgaccacgcccgcgcctcgggcggccccgccgacccctcccgcacctcgcgcggccccgtcgacgccaacggttcgcttcaccgaccccgcgctcatctaccaccgtcaccgccacgtcactacctcggcagtcgctgacccgggcccgttgacgagcccggtgcgcttcgccgaccccgccgtcatccatcatcgctgcgagtcggccacgcccgcagcccctgacgtcccggcagaccgccccgagccaccgatgtaccactcggtcgctatccaccgcgatccctggcacgtccacccgatggtgacccagcgcgccgctggcgtccttcgattgtcgaccggctgatcttggcagctgctacgcctaccactccaccggacgcttccccggtcccctcctccgttcgcaccgctctcgccgaaccacactggcgacgcgctatggaggagtacgcggccctcctggccaaccacacctgggacctggtgccacgtccaccaggcgccaacgtggtcaccggcaagtggctatttcgccacaagcttacttcggacggctccctcgatcgctacaaggcccgttgggtccttcggggcttcacccaacgccccagagtggactacgacgagacctctagccccgtcgtcaagttcgccactgttcgcaccgtcctctccctcgccctctcccgggactgggcgatccatcagctcgacgtcaagaatgccttcctccacggcactctgacggagactgtctactgcagccagcccaccggcttcgtcgacgaagcccgtccagatctggtctacaggctgaaccgctccctctacggcctcaagcaggcgtcgcgggcctggtacagccgcttcgcttcctacttgacctccatcggcttcgtcgaggccaagtcggacacgtccctcttcatctaccaccgcggcgacgacaccgtcttccttctgctctacatcgacgacattgtgctcacggcatccaccgccgacctcctacagcgcacgatcgtcgccctgcagcgggagttcgcgatgaaggacctagggcccctccaccacttcctcggcatcaccgccgagcgccggccccagggtctcttcctccatcagcgccagtacgccatcgacatactggagcgggctggtatgtccgactgcaagccctgctccacgcctgtcgacactcaggcgaagctctcagaggacgtcgggcccctggtcgccgatgcgacatcctaccggagcctgaccggcgcgctccagtacctcaccttatccaggcctgacatcgcctacgtcgtccatcaagtgtgcctccatatgcacaccccgcgggagcctcatctcaccgctctcaagcggatcctgcgctacctccgtggctccctcgactacggccttcttctccgaccatccccgacgtcggaactcgtggtctacaccgacgccgactgggctggctgtccagacacgcgtcgatccacctctggttacgccgtgttcctgggcgccaacctcgtctcctaggccgccaagcggcagcccgtcgtctctcgctccagtgctgaggccgagtaccgcgccgtggccaacggcgtggcagaggcctcctgctgcgacagctcctccacaagctccacagtcccctccagcgcgccaccctcgtctactgcgacaacgtcagcgcagtctacctctccaccaatcccgtacagcatcagcgcacgaagcacgtggagatcgacctgcacttcgtccgcgagcgtgtcgccgtcggtgacgttcgggttctcagcgtcccaactacgctgcagttcgctgacatcttcacaaggggttaccgtcgagtgtatttttagactttcgctctagtctcaacatctgtacaggatagagttgtgactgcggaggggtgttggaactgtattagggtttgggtacatttactctcttgtccctctgtaatgggccaggcccaactccaaatggctattaatacacaggccaccctatcctagggttagattttgcatattcctacaagaacaagacttgtacaaacttctgacataaaatctgctatttcgataaattaaaagatcaaattaaaaagaaactaatctctgcaactcctctaggatgctggattttttccttgtagacatctagacaagtgagaagggcaggtctggcacaatggtgagaaacctttccactgagcaaaaggtctaggattcaatgcagcctctctgcaaaatgcagaggtaaggattgccttggttactcctccggaccccactcatgtgagagctgccagcactgggtctgtcattttttagacatctagacaggtcttgctgtagtcctaagttgtcttcggtggatcgtgtaaaataggggacgtggcactgtaaattacacttttaataggactaagatgcatcagcagtggctaaaacttgtccaagcatgttatcgagatccctgagctattaatttgcaatttcatgtccctcaacttgttatgtggttcactcaaggtgcaaaccccatggtaaatcctttggctggcgacgtggacactaacaagactctatgctgatggacattaacaaggtgtgaacgagaggggggagaaagagatgtaggggctgccaagtaggatggtcgtggactagctgattttgaaggatcgaaccctgagtgaaccatttaggaagatcagggatgttttgaatccaaactaatcgtttgggaacctagatgacattcccagacaatttgaagaatgtttgtgtattttattcttttaaaaggtgcctcaaaaacaatcacaaaaaatcaacttgggaaaaaagacccgtatgaaacagaaaatataactaggtgtagcaaaaagaaaacctgaatttcaagtgggtgcccatggattcccattcgacgatcaatcatgcatgaaccatctgttacgagcaatgtagggaacatgtcgaaaccatcagctaag

SEQ ID NO: 694 - DNA, 13092 bp, Zea mays
  source (0)...(0): Zea mays BAC clone full insert sequence contig bacb.pk155.h15.fis31
aagtcattacggggatgacgaaccacacgacgtgcacgaccacggcgatctccatcgtccagctcagtgtcaccgccgtattcctgctccatctttgtggtcaatgcatcaaggcgtgccaggatggtgtcgagtgtggtgcgagtcgccgtttgagcaaggtcaagttggttgaaacgctcggtcgtcgaagtgatcgttgaatcaagccgttcatgcatcgtcctaatgtcagcagcaagtccatcaacttgtccccgtacttcctgcaactgggcatccaccatgtcgtgtgctcctgccatagttagcgcaaacaccaaaacaccaaaaggagaaaaaaaccaacgaccaaaaacaggggtgtactgctcacaaggcgctcacactagtgctgttatcaagttcttatccgttcttaccaagccacagtggtgaactgcaaccaacaggtggaaccggtgaaagattggatgagcgattgcctagagaaacagaaaccttctcgtcgtagaaatatgtggagttttgggtaggctgcactcaagtcaaggattagcacgatcaaacaataatgcaaagttgaattatagtgcaaaacacgaaactatattgctggccacaggtgcaaaggatggatggaactagcagaatggcagtaccgtaaatattgtactagtgatgccaaaaaggcactagtagaaaacacaggtgattttgtttttcttttttgtatgatttttttgatatttttctcagcaaaagaagcaacaagataggagctacacgaagtttcacctaaaacagatatcagatgtggtctatagaaaatcaggaagttctctgaaaagcgtgcgagaactttgacgaatttttttctttattttcctgaatttttttgataattttgtcgaaaccaaacagacaattttgtcgaaaccaaacagggctcagaatggtgtcaacaagctcctgtaaaaatttcagattttttggacacccgagcgaaaagttatgcccggtttacggaaggtacctcaagttatgttttaaaaacgaccgggatgaaacaaccgtatcctttctccttcgttttctttttttttgtttctgttttttttatgtaaccgaaggagaaaaacaaggaagcggtcgttgactcggtttgttttttttttctgttttttttgtaaccgaaggagaaaatcaaggaaacggccgttgactcggtttgtttttttctgtttttttttgacgtaaccgaaggagaaaaataaggaaacaatgttgactcgatttgtggcgtgatcaaacgggagatggtggcggcgctagggtttgaatggtggaagaacacaatgcaaccagcaacaaatgacgcgaaagcacacaaattcaacaatgcagattatggaaagaaagtgcgaggctcaaaaggtgctgggataagatctaacctgaattttaatgtggttttgtggactgtaggaaaaaaaacgctcaataaactcaccgatcaacctggaaatctgataccaattgatgaagctgaggtgcccgatctttcggcgagtagagataattccgatttggcggaagatgacccttgcgatccgactacgacgagcaagcccgaggcgccaatgcaatcgctgaaccaactccctgtggttaccgaccttgctgatgcgagatcggcctgatcacgaagatcgtttcctgtgcgcaatcgaagaacgaacaagaaaaagatgcgagcaatctaatctattactcgagggtggagttctgaatacacgaagacagcgcagatttgcgcgcgttcgagagtagctaaggctaacgtaaaacaaaactcgagaataaaggaggcgcagctcctggataaatagagggggcgcagcccctaggggcggccaaccctaggtcgtccactatgggccgcagttgggctggtcgtctattcttctgggccctcattcttcagtagcatgacgaagttaagatctctggcacgggcccgagtgattggcccagctaatgaaggaagtggcgcttgatgtggaggtgctgctggtgtagtcgtactcatagtgatgtcctcatcaaagctcctccgaagccgaggtcgagtctgtcttccgtggctgaggtcgagtccgagcccctgggtcgggcgaggcggaggccgccggctgaggccagggcggagtccgagccctggggtcgggcggagcggagttcgccgtcttctagggcttagcccaagtccgagccctgggtcgggcggagcggagttcgccgtcttccgagacttagcccgagtccgagccctgggtcgggcggagcggagttcgccgtcttccgggacttagcccgtgtccgagccctgggtcgggcgaagcggagtttcctatggtgccttcggcagggcctgaccgcctgtcagtctcactctgtcaagtggcaccgcagtcggagtggcgcaggcggcgctgtccttctgtcaggccggtcagtggagcggcgaagtgacgacggtcacttcggctctgccggctggggggcgcgcgtcaggataaaggtgtcaggccacctttgcattaaatgctcctgcgatttggtcggtcggtgcggcgatttggtcagggttgcttcttggcgaagacagggcctcgggcgagccggaaatatgttcgccgctggaggggggcctcgggcgagacggaaaccctccggggtcggctgcccttgtccgaggctaggctcgggcgaggcgtgatcgagtccctcgaatggaatgatccctgacttaatcgcacccatcaggcctttgcagctttgtgctgatgggggttaccagctgagaattaggagccttgagggtacccctaattatggtccccgacagtagcccccgagcctcgaagggagtgttagcactcgcttggaggctttcgtcgcacttttttgcaaggggaccagcctttctcggttgcgttttgtttcggtgggtgcgcgcgagcgcacccgccgggtgtagcccccgaggcctcggaggagtggtttcactccttcgaggtcttaatgcctcgcgtaatgcttcggctggtctggtcgttccctcatgcgagctggccgtagcccgggtgtacggtcgggtcccaagttctcgggctggtatgttgacgctgtcaacggttcggccggagccgggtttgcgagagcagcccccgagcctccgcacaaggcgagagggcgatcagggacagactcggcttttttacatacgcccctgcgtcgcctttccgcaaggaggagggggggaaagcgccatgttgccctcgatgggcgccgaacatggtgtctctggtgagctgcaagagggtaatccgagtggacgtccgtgccccgttcgttaggggtcggctaggggcccagaggcacgcccaaaagtacctgcgggtgatctgtcggacccggtcccctggcaacggggtccgagggctcaatgcctccctctgatgggattccgttacaagatcgttcccgctggtctcggaaatgtcctagggtacctcgggagcgcagcccaagccttggttatgtatcgaacgtacccatggtcatccctcgctcggagtttgaggcggctgtgaacccttcgggggccagccttcgaacccctgatcagtaatgggcgcggagcccgagtagcctgaggcggccgtggaacccttccgaggggccggccttcgaacctctgaccagtagtgggtgtagggcccacacgatctgaggcggctgtcgaacccttccggggggccagccttcgaacctctaatcagtagagaggctcagagcctggttccttcacggggaaggatccttttcggggtatccccctttcccggtccctgttgcaagagagagaaagaggaaaaaaggaaaaggatacgaaatcgaacgacgcggcgtaccttttttgacgcggtcattatggcgaaggcgaagcgtcgccagcttctcctgccaggggcgccgcctgtcccgccgcggagttaatgcgacggggcgagtggttggcggggcggccgttgcgcatgcgcgagccgttcgaggaacggagcacgggcgcgttgtcttcacgtcgtgagagagggttctcttgctgcccccggatggggcgtgagcttgtgccgccctcgggcgtcttgtcgcagccgaagcaccaggtcgcccacctggaggtctcgggaccggacccctcgggcgtggtagcgtcgcagggactgctggtaccgcgctgagtgtagtaaggccttgtcccgagcctcctccagctggtccaacgagtcttctcggctagcttggttgctttggtcggtgtaggccctcgtcctcggggagccgtattccaggtctgtgggcaagacggcctcgaccccgtagactaggaagaacggcgtgaagcccgtggttcggctcggcgttgtcctcagactccagaccaccgaggggagttccttcatccatcgcttgccgaacttgttgaggtcattgtagatccgaggctgagcccttgcagaatcatgccgttggcacgctctacttgcccatttgacatggggtgagctacggcggcctagtccacccggatgtggtgatccccgcagaagtccaggaactttctgccggtgaactgggtgccgttgtcggtgatgatggagtttgggaccccgaagcgatggatgatgttggtgaagaacgccatcgcctgttcggacctgatgctgtttaggggtcggacctcgatccacttggagaatttgtcgatggcgaccagcaggtgcgtgtagcccccgggtgccttctgcaaggggccgacgagatccagaccccacacagcaaaaggccaggtgatgggcatcgtctgcagagcctgagcgggcaggtgggtctgccttgcgtagaactgacacccttcgcaggtgcgaacaattctagtggcgtcggccactgccgtcggccagtagaagccttgtcggaaagcattcccgacaagggctcgaggcgctgcgtgatggccgcaagcccccgagtgtatctctcgcaggagttcctgaccttcggcgatggagatgcatcgctggaggatgccagaggggctacggtggtagagctccttctcatcgcccagcaagacgaacgacttggcgcgtcgcgccaaccgccgagcctcggctcggtcgaggggtagctctcctcagtggagatattgcaggtacggggtccgccagttttgattaggcgtgaccccgcttcgctcctcctcgacgcgcagtgcctcaccctcgggtgccgagggtgcctcgggctgagccgagggtggctcgggccgggctgagggtgcctcgggccgtgccgaagatacctcggactgagccgaggttacctcgggctgggccgagggtgccttgggctcgggcgtgtcgtcgatcttgatggagggttgatgtaggtctcgggagaagacgtccggggaaccattgttcgccccgaggctattttagccagctcgtccgcagtctcgttgtagcgccgggcgatgtggctgagctcgagcccgtagaatttgtcctccaggcgccgaacctcatcgcagtaggcctccatcttcgggtcgcggcagtgggagttcttcatgacttggtcgatgacgagctgcgagtcaccgcgagcgtcgaggcgtcggacccctagctcgatggcgatccgcaacccgttgaccagagcctcatactcagccacattgttggacgcagggaaatggaggcgtagcacatagcgtatgtgtttcccgaggggcgagatgaagagtaggcctgcgccggctcccgtcttcatcaacgacccgtcgaagaacatggtccagagcttcggttggatcggagccgtcggtagctgggtgtcgacccattcggccacgaagtccgccaagacctgggacttgatggccttccgaggggcgaacgagattgtctcgcccatgatttccaccgcccactttgcaatcctacccgaggcctctcggcactggatgatctcccccagggggaaggatgacaccacggttaccggatgagactcgaagtagtgtcgcaacttccgccgtgtcaggatcactgcatacagcagcttctgaacttgtgggtagcagatcttggtttcggacagtacctcgctgacgaagtaaactggcctctgaacgggcaatgcatgcccctcttcttgcctctcgaccacaatcgcggcgctaaccacctgagtggtcgcggcgacgtagaccaagagggcttctccggcagctaggggcaccaggataggcgcctttgtgaggagcgccttcaagttcccgagggcttcctcggcctcaggggtccaagtgaagcactcggccttcctcaagaggcggtacagaggtagacctctttcgccgaggcgtgagatgaagcggctcagagccgcgagacatcccatgaccctctgtacgcctttcaagtccttgatgggccccatgctggtgatggctgcgatcttctccgggttggcttcgatgccccgctcggagacgatgaaccccaagagcatgcctcggggcaccccgaagacacacttctcgggattgagcttgacgcctttcgccttgagacatcggaatgtcacttcaaggtcggaaaggaggtcagaagctttcctcgtcttgactacgatgtcatcgacgtaggcctcaaccgtgcggccaatgtgttcgccgaacacatggttcatgcaccgctggtacgtcgcgcccgcattcctcaagccgaacggcatggtgacatagcagtacatgccgaagggtgtgatgaaagaagtcgcgagctggtcggactctttcatcctgatttgatgataccctgagtaggcatcgaggaaagacagggtttcgcacccagcagtggaatccacgatttgatcgatgcgaggcagagggtagggaaccttcggacatgctttgttgagaccagtgtagtctacacacatccgccatttcccccctttctttctcacaagcacagggttggcaagccattcaggatggaatacctctttgatgaaccctgccgccattagcttgtggatctcctcgcctatggctctgcgcttctcctcgtcgaatcggcgcagaggctgcttgacgggtcgggctccggctcggatgtccagtgagtgctcggcgacatccctcggtatgccaggcatgtccgagggactccacgcaaaaacgtcggcgttcgcgcggagaaagtcgacgagcactgcttcctatttgggatcgagcccggagccgatccggatctgcttggaggcgtcgccgctggggtcgaaggggatggacttaaccgtctccgctggctcaaagttgccggcatgacgcttcacgtctggcacctccttcgagaggctctccaggtcggcgatgagggcctcggactcggcgagggcctcggcgtactccacgcactccacgtcgcattcgaacgcgtgtttgtacgtggggccgacggtgatgatcccgttggggcccgacatcttgagcttcaggtaggtgtagttggggacgaccatgaacttcgcgtagcacggtcttcccagcacagcgtggtaggttcctctgaacccgaccacctcgaacgtcagggtctcccttcggaagttggagggtgttccgaagcagacaggaagctcgagttgtccgaggggctggacgcgcttcccgggaatgatcccatggaagggcgcagcgcctgctcggacggaggacagatcgacacgcaggagcccgagggtctcggcgtagacgatgttgaggctgctgcctccgtcaatgaggaccttggtgagcctgacgttgctgatgacggggtcgacgacgagcgggtatttccccggactcggcacatggtcggggtggtcggcctggtcgaaggtgatgggcttgtcggaccagtctaggtagactggcgccgccaccttcaccgagcagacctcccgacgctcttgcttgcggtgccgagccgaggcgttcgccacttgcccaccgtagatcatgaagcagtcgcggacctcggggaactctcctgcttggtgatcttccttcttatcatcgtcgcgggccctgccaccctccgcgggtggcccggccctgtggaagtggcgccggagcatgacgcactcctcaagggtgtgcttgacgggcccctggtgataggggcacggctccttgagcatcttgtcgaagaggttggcacctcctgggggtttccgagggttcttgtactcggcggcggcgacaaggtccgcgtcggcggcgtcgcgtttcgcttgcgacttcttcttgcccttcttcttggcgccgcgctgagttgacgcctcgggagcatcttccgatgggcggccctggggctacttgtcctttcggaagatagcctcgaccgcctcctggccggaggcgaacttggtggcgatgtccatcagctcgctcgtcctggtgggggtcttgcgacccagcttgctcaccaggtcgcggcaggtggtgccggcgaggaacgcgccgatgacatctgagtcggtgatgttgggcagctcggtgcgctgcttcgagaatcgccggatgtagtcccggagagactctcccggctgctgccggcagcttcggaggtcccaggaattcccgaggcgcatgtacgtgccctggaaattgccggcaaaagcttggactaggtcgtcccagctggagatctgccccggaggcaggtgctccaaccaggcacgagcggtgtcggagaggaacagggggaggttgcggatgatgaggttgtcatcgtccgttccacccagttggcaggccagacggtagtccgcgagccacagttccggtctcgtctcccccgagtactttgtgatagtggtcgggggtcggaaccgggtctggaacggtgcccgtcggatggcccggctgaaggcctgcggaccgggtggttcgggcgagggactccgatcctccccgctgtcgtagcgtcccccacgcctggggtggtagcctcggcgcaccctctcgtcgaggtgggcccgacggtcgcggtgatggtgctcgttgccgaggcggcccggggccacaggcgtggtgttgcgcgtgcgcccggtgtagaccgaggcttcccacatgaatcgggaagtcgtggcataaggttccgaggggtacccctgccttcgggaggcagagctctcggcccgtcggaccgcggcgccttccaggagattcttgagctccccctggattcgccggccctcggtggttgatggctccggcatcgcgcggagaagcgctgctgcagccaggttctggccgaccccactagatgcgggtggtggcctgaccctgacgtcgtcggcgacgtggtgctggaagccctggggcagatgacgtatttctccggccgggggttggcccgcccatgcctgcccgacgtcccggcggatcggctcaagcgctcctgctccctcgtcgagcctggcctgcaccccgcggatttgctcgagctgtgggtcatgcccccccgtctgaacggggaccacagctagctcccgtgggatgccaacgcggggcaccggcctagggagatcaccgtcctccggcatgccgagatgattgccttcggagggaccccctagatcgacgtggaaacattcgcggctcgggccgtagtcctcgtcgccgaggctgcggctcgggccgtagtcctcgtcgccgaggctgcggctaccgtcggaatagtcggagaggcagtagtcacatgcggtcatgaagtcccgcatggcactggggttgccaagtccagagaaatcccaacagatgttgggctcgtagtcttcctcggacccagagggcccgacggtcgagacgtccgtcagccggtcccaaggcgaccgcatgcgaaaccccagagggtttggactcgcctcttcgagagcgcccgccaaagcggggtcgctaggcgggttgaggctgaatccaaatgacgtgggatgggaatcggtcggtaccttttggtcgacgagcggcgataaagtcacgccggggactgactgcaccatcgtctcaggtacgagggtgacgtccagcaagcttttcgcgagcgcgctggcgtcgtccgcttgctcgggattggcgtgtcgcggggagacgacactcgtcttcatctcaagcgcgaagtcgatacccggtgcgctccccgttggggtgccggcgctgtcgactcgctcgacagccgacgaggcgctgcctcctgcttggccttggttgccctgccttcccctctgacggcggggaagagggcgggatgagctcgaaggttgttcttccaccacgcgaggaagacgtcgtcgattccgccgccggcgggcgggcagtcggccgccattgtcgttgtcgcgcggcggtggaaggagtatcatgtcgtagctgccgtcgagggacatgaactcaagactcccgaaacggagcaccgtctcgggttggagaggttgctggagactgcccatctggagcttgacgggaagctgttcgtcaacacgcagcaggcccctacctggcgcgccaactgtcggcgtttcgagaccggggggtccctgggccgacgagtgaatgtcgccgcgtgccccagcccagatgggtcgagcgcgagggcgagcgcgaaggggggagagcgaggcggtcggagaccggcgtgagagaggtgggaatcccgcggccttcgtgttcgtcccacgcccaggtcgggtgcgcttgtagtagggagttacaagcgtccacgcgggagagggagcgagcggcttcaagcgagcgcctatctcgtcctcgtccccgcgcagccaaccccctctaagagggccctggtccttccttttataggcgtaaggagaggatccaggtgtacaatggggggtgtagcagagtgctacgtgtctagcggaggagagctagcgccctaagtacacgccgttgtggcagccggagagattttggcacccagctggtgtgatgtcgtggccgtcggaggagcgatggagcctggcggagggatagctgtcggagcgattgagtccttgctgacgtcctcttgcttccgtaagggggctgagagccgccgtcgtcacagagaatgcggggcgccatcattgcctgtctggcggagcgagccagatgggacgccagtcttgttccctgcggcccgagtcagctcagggtagggtgatgatggcgcctcctgttgacgtggccggtctgcgtcctaggttgggcgatgtggaagctcctccgaagccgaggtcgagtctgtcttccgtggctgaggtcgagtccgagcccctgggtcgggcgaggcggaggccagggcggagtccgagccctggggtcgggcggagcggagttcgccgtcttctggggcttagcccaagtccgagccctgggtcgggtggagcggagttcgccgtcttccgggacttagcccgactccgagccctgggtcgggcggagcggagttcgccgtcttcctggacttagcccgagtccgagccctgggtcgggcggagcggagttcaccgtcttccgggacttagcccgtgtccgagccatgggtcgggcgaagcggagtttcctatggtgccttcggcagggcctgaccgcctgttagtctcactctgtcaagtggcaccgcagtcggagtggcgcaggcggcgctgtccttctgtcaggccggtcagtggagcgacgaagtgacggcggtcacttcggctctgccggctggggggcgcgcgtcaggataaaggtgtcaggccacctttgcattaaatgctcctgcgatttggtcggtcggtgcggcgatttggtcagggttgcttcttggtgaagacagggcctcgggcgagccggaaatatgttcgccgctggaggggggcctcgggcgagacggaaaccctccggggtcggctgcccttgtccgaggctaggctcgggcgaggcgtgatcgagtccctcgaatggactgatccctgacttaatcgcaccatcaggcctttgcagctttgtgctggttggggttaccagctgagaattaggagccttgagggtacccctaattatggtccccgacacaaatacaatttgattcatacaattttttatgaactaccatttttccgcatgtatggctttaagttcttgataaacccaatgggtagaagggtgcccgatctttcgatgagagatgatggaggtggaaaacttgttggagaacgacgttggctgcccgactaccacaaccaagatggtgttgcgccttgagcgacaggtacaccgtctcctgataactacgatttggggtggaggtcgacgttgtgctatccgactacaacaaccacaagggtgctgcgccttagcgatagttacaccggctcctgttgttgctgctcttgccgtgccaagaacagccttgaacctgcaagcaatcgagaacaagcaagaacaagataacaagcaaacacgcaccgatctgataaagttggggtctcgtttcaagtattcgggtggtctagccgacacacgcgtttacaaggaagtagcaaaggctaaacttacatcaaacaaaacccccatgttctttggtggctgctagttgcttaaatagagaaataggaagaaggaattctggtggagtcatgaagttccctcggcagtttctggacgcctcaggtgtagtctcccattaattcttgatccaccagcaagtatacgaagggagctttccaacaagtatttatttgcattaaacggccttggaagttggaagatatgccccatttaaacttgtacttggtgctgttacgaaatcctctcgggtgcagcagcctttattgccttgttgccttctccagtccaagatggttcaccctcccaaacacctgagcataataaagtcatcgcaaggc

SEQ ID NO: 695 - DNA, 3234 bp, Zea mays
  source (0)...(0): Zea mays BAC clone full insert sequence contig bacm.pk128.j21.core.fis1
ttccggtgtcaaaaactcgtgctttgtatgcaccccgacaaccgttttcggaatgtgtgacgtgcgacaacgaaattgcgcgaaaccaccccaaacatgtgatgaggacatcaacaccaacacgagcacatctacaccagcagcaccttctccagcccaggcgccaccccttccacctgggccagtgactcgggcccgtgcaagagaattgaactacatcatgttgttaaagaacgaaggcccggaaggatagacgaccagcccaattgcggcccataatggacgacctagggttggccgcccctaggggctgcgccccctctctatttatacaggagctgcgcctcctttatttttgggagttttgttttacgttagccttagctacttccgaacacgcgcaaatctgcgctgtcctcgtgtattcagaactccaccctcgagtaatagattagattgctcgcatcttgttcttgttcgttcttcgattgcgcacaggaaacgatcttcgtgatcaggccgatctcgcatcagcaaggtcggtaaccacagggagttggttcagcgattgcattggcacctcgggcttgctcgtcgtagtcggatcgcaagggtcatcttccgccaaatcggaattatctctactcgccgaaagatcgggcacctcagctacatcaattggtatcagatttccaggttgatcggtgagtttatcgagcgttttttttcctacagtccacaaaaccacataaaaattcaggttagttcttatcccagcacccttttgagcctcgcactttctttcaataatctgcattgttgaatttgtgtgctttcgcgtttccttgttgctggttgcattgtgttcttccaccattcatatcctagcgccgccaccatctcccctttgatcacgccacaaaccgagtcaacattgtttccttgtttttctccttcggttacgtaaaaaaaaacagaaaaaacaaaccgagtcaacggccgtttccttgtttttctccttcggttacgaaaaaaaacagaaaaaaaaaaaccgaggcaacatcgtttccttgtttttctccttcggttacgtcaaaaaaaaaacagaaacaaaaaaaaacaacgaaggagaaaggatacggttgtttcatcccggtcgtttgaaaacataacttgaggtaccttccttaaaccgggcataacttttcgctcgggtgtccgaaaaatctgaaatttttacaggagctagttgacaccattctgaggccggccaaactcaccttcggtctgtttgggttcgacaaaattgtcaaaaaaattcaggaaaataaagaaaaaaatccgtcaaagttctcgcacgcttttcagagaacttcctgattttctgtagaccacatttgaactctgttttaggtgaaacttcgtgtagctcctattttgttgcttcttgtgctgagaaaaatatcaaaaaaatcatacaaaaaagaaaaacaaaatcacttgtgattcctactagtggcctcgctagtacaatatttacggtactgccattctgctagttccatccgtcctttgcacttgtggccagcaatatagtttcgtgttttgcactataattcaactttgcattattgtttggtcgtgctaatccttgacttgagtgcagcctacccagaactccacatatttctacgacgagtaggtttctgtttctccaggcaatcgctcatccaatctttcaccggttccacctgttggttgcagttcaccactgtggcttggtaagaacggataagaatttgataacagcactagtgtgagcgccttgtgagcagtacacccctgtttttgtcgttttttttggtgttttggtgtttgcgctaactatggcaggagcacatgacacggtggatgcccagttgctggaagtaaagggacaagttgatggacttgctgatgacattaggacgatgcatgaacggcttgattcaacggtcacttcgacgaccgagcgtttcaaccagcttgaccttgctcaaacggcgactcgcaccacactcgactccatcctggcacgccttgatgcgttgaccacaaagatggagcaggactacggcggtgacactgagtgggacgatggagatcgccgtggtcgtgcacgccgtgtggttcgtcatccccctaatgacttattttctaagattaaatttaaaattccaccttttaatggcaaatatgatcctgctgcatatcttgattgggagttagaggttgaacaaaaattttcatgccatgatattgctgcacattctcaggttaaagctgctattagtgaatttactgattttgctttaatttggtggcgtgagtttaaaataaaacatcccactaccattccaaccacttgggatcagttgaaagctgcgatgcgacatcgatttgtgccttcgtattatgctcgtgatttgcttaataaaatgcagcgttttcagcaaggttctcaatctgttgaggactatttccaggagttacaaaaaggtatgattcgttgtgggatattggaggacaacgacgctgctatggcacgttttcgtggtggtttaaaccgcgaaatccaagatatacttgattataaggaatattatgatatgactactttatttgaatatgcttgcaaagctgaacgtgaagtgcagggacgccgctcgaagccatattctaacccttttgcaggacgaagctcgacatccacctcagcaccagttccccctgcgccatccacgtccaccactactccacgcgagaagacgaccaaaccagccagcactgccgcacccacaggtcgtacacgggatattcagtgtcatcgctgtagaggatttggccatgtgattcgggactgcccaaacaagcgcactttactcattcgtgacgatggtgagtactcttccgctagtgattctgaagaaattgaacatgcactacttgccactgaccatgcagctaaggcggaggtacatgtcaacccgggcgacgctgataggtatgaaagtcttgttgtgcagcgtgttcttagtacacaggtcgctttgcccgagaagaatcagcgacacactctgttccatacaaagggtgttgtgcaggagcggtcaattcgcatcattatcgacagcggcagttgcaacaatttggcgagtaccatgctggtcgaaaagttgtcgttacccactcgta

SEQ ID NO: 696 - DNA, 6575 bp, Zea mays
  source (0)...(0): Zea mays BAC clone full insert sequence contig bacm.pk128.j21.core.fis2
ttccggtggcaaaaactcgtgctttgtatgcacccgacacccgttttcggaaagggtgacgtgcgacaacgaaattgcgcgaaaccaccccaaacatgagttttggacctaaagtagtggattgggcatgtttgttgctgatgtagctgaggtgcccgatctttcggcgagtagagataattccgatttggcggaagatgacccttgcgatccgactacgacgagcaagcccgaggcgccaatgcaatcgctgaaccaactccctgtggttaccgaccttgctgatgcgagatcggcctgatcacgaagatcgtttcctgtgcgcaatcgaagaacgaacaagaacaagatgcgagcaatctaatctattactcgagggtggagttctgaatacacgaggacagcgcagatttgcgcgtgttcggaagtagctaaggctaacgtaaaacaaaactccccaaaaataaaggaggcgcagctcctgtataaatagagagggggcgcagcccctaggggcggccaaccctaggtcgtccattatgggccgcaattgggctggtcgtctatccttccgggccttcgttctttaacaacatgatgtagttcaattctcttgcacgggcccgagtcactggcccaggtggaaggggtggcgcctgggctggagaaggtgctgctggtgtagatgtgctcgtgttggtgttgatgtcctcatcatcctccccttcttgaactgaagtcgtcctcgacggcaactcctcatcttctcccgcatacggtttcaaatctgcaacattaaaactagtggaaacaccaaactccgcaggcaggtcaaggatataagcattatcattaatcttggttagtaccttaaaaggaccagcagcacgaggcatcaatttagaacggcgcaaagtaggaaaacgatcctttctcaaatgcaaccaaaccatatcaccaggttcaaaagtaactagtttccggcctttactaccagtaatctgatatttagcattagcagcagcaatgttttgttgagtttgttcatggagattaatcatttgttcaacatgtgcaagagcatctatgtgtggggcgtccgtagcatcaagcgaaaacaaagcaataggcgccctaggaatgtaaccataaacaatttgaaaagggcacatctttgtagaagaatgtgttgcatgattataagcaaactcaacatgaggtaagcaatcctcccaacgtttcaaatttttgtctaaaacagccctaagcatggtagacaaagttcgattaactacctcagtttgaccatcagtctgagggtgacaagtggtgctaaacagcaatttagttcctaatttattccacagagatctccaaaaatgactcagaaacttggcatcacgatccgagactattgtattgggaataccgtgcaaacgaataatctctctaaaaaacaattcagcaacattgctagcatcatcagtcttatgacaaggtatgaaatgagccattttggagaatcgatcaacaaccacaaaaatgctatccctccccttcttagttctaggcaatcccaaaacaaaatccatcgaaatatcaatccaagggaaagtaggaacaggcaaaggcatatacaaaccatggttgttcaaccgtgacttagctttctgacaagtagtgcagcgtgcaacaaggcgctcaacatcagcgcgcatccgaggccaaaagaagtgggcagccaacacctcatgtgtcttgtagacgccaaagtgccccatgagaccgcctccatgtgcttcctgtaacaacaaaagacgaaccgagctagctggaacacacagcttgttagcgcgaaacaggaacccatcctgtatgtgaaatttgccccatggtttcccattaatacaatggccgaaagcatctttaaaatcagcatcgtcaacatattgatcttttacagtgtgcaaaccaaagattttaaaatctaactgtgacagcatggtatagcgacgagacaaagcatcagcaataacattgtccttcccgttcttgtgtttaataatgtaaggaaaagactcaatgaattctacccatttagcatgacgacggttcagatttgtttgggtacgaatatgttttaaagcctcatgatcagaatgaattatgaactcacgatgccaaagatagtgctgccatgtatgtaaagtgcgcactaacgcgtaaagctccttatcataagtagaatatttcagactagcaccgcttaatttttcactaaaataagcaactggttttccttcttgtaataaaacagcacctagcccaataccgctagcatcgcattcaagctcaaatactttattaaaatcaggcaattgcaataggggagcttgggttaacttatctttcaaagtgctgaacgcttcctcctgcgaatcactccaagcaaatggcacatctttctttgtaagctcatgtagaggcgctgcaatggagctaaaatcacgaacaaatctgcggtagaaaccggcaagtccaagaaagctccgaatttgtgtgaccgtcgtcggtgtaggccactcccgaatggcagcaatcttgctgctatccacctcaatgccctgtggagtaacaacataaccaagaaacgagacacgtcgtgtgcaaaagatgcatttttccatgttagcgaataactgggcggcacgcaatgcatcaaaaacagcacttaaatgttccaaatgctctttcttagatttgctgtaaataaggatatcatcgaaataaacaaccacaaacaatcctatgaagggcctcagaacttcattcatcactcgcataaaagtgctgggagcattagtcaatccaaacggcataaccaaccattcatataaaccaaatttcgttttgaaggctgttttccattcatcacctagtttcattctaatctggtggtaaccactacgcaaatcaatcttagtgaaaataatggcaccactaagctcatctagcatatcatcaaggcgtggtataggatagcgataacgaatagtgatattattaatagcacgacagtctacacacatacgccatgacccatccttcttgggaacaagtaacacaggaacagagcaagggctaagagactcacgaatgtatcctttgtcaagcaacgcctttacctggcgctgaatctccttcgtctcatccggatttgtacggtatggtgcgcggtttggaagctgtgcaccgggaatgaggtcgatctggtgctcaatgccacgaagcggtgggagacccggtggtaagtctttgggaaagacatcagcgtactcctgcaaaaggttagcaaccatagggggaatagccaaagatggtgcatcatcaagtgaaatgaggacactagagcatacaagtgcatagcatggcaaatgagcaccgtgtagatcatcaaaatcagcacgtgtagcaagtaaaacaggagccttcaacttaatttcagaaggaacagagtgcgatggatcaagttgtttagcagttatagcagctcgggcaagatcatctttaacaatttgttcaggtgtcattggatgtataattattttctgacccttaaaaatgaaagaataatgattcgaacgaccatgatgcaagctatcagtatcatattgccaaggtcgaccaagtaacaaagagcatgcttccatgggaataacatcacaatcaacaaaatcagaataagcacccatggagaaaggaactcgcacggaacgcgtgatttttattttaccaccatcattaagccattgaatgtgatatgggttcggatgcttacgagtgggtaacgacaacttttcgaccagcatggtactcgccaaattgttgcaactgccgctgtcgataatgatgcgaattgaccgctcctgcacaacaccctttgtatggaacagagtgtgtcgctgattcttctcgggcaaagcgacctgtgtactgagaacacgctgcacaacaagactttcatacctatcagcgtcgcccgggttgacatgtacctccgccttagctgcatggtcagtggcaagtagtgcatgttcaatttcttcagaatcactagcggaagagtactcaccatcgtcacgaatgagtaaagtgcgcttgtttggacagtcccgaatcacatggccaaatcctctacagcgatgacactgaatatcccgtgtacgacctgtgggtggggcagtgctggctggtttggtcgtcttctcgcgtggagtagtggtggacgtggatggcgcagggggaactggtgctgaggtggatgtcgagcttcgtcctgcaaaagggttagaatattgcttcgagcggcgtccctgcacttcacgttcagctttgcaagcatattcaaataaagtagtcatatcataatattccttataatcaagtatatcttggatttcgcggtttaaaccaccacgaaaacgtgccatagcagcgtcgttgtcctccaatatcccacaacgaatcatacctttttgtaactcctggaaatagtcctcaacagattgagaaccttgctgaaaacgctgcattttattaagcaaatcacgagcataatacgaaggcacaaatcgatgtcgcatcgcagctttcaactgatcccaagtggttggaatggtagtgggatgttttattttaaactcacgccaccaaattaaagcaaaatcagtaaattcactaatagcagctttaacctgagaatgtgcagcaatatcatggcatgaaaatttttgttcaacctctaactcccaatcaagatatgcagcaggatcatatttgccattaaaaggtggaattttaaatttaatcttagaaaataagtcattagggggattacgaaccacacggcgtgcacgaccacggcgatctccatcgtcccactcagtgtcaccgccgtagtcctgctccatctttgtggtcaacgcatcaaggcgtgctaggatggtgtcgagtgtggtgcgagtcgccgtttgagcaaggtcaagctggttgaaacgctcggtcgtcgaagtgaccgttgaatcaagccgttcatgcatcgtcctaatgtcatcagcaagtccatcaacttgtccctttacttccagcaactgggcatccaccgtgtcatgtgctcctgccatagttagcgcaaacaccaaaacaccaaaaaaaacgacaaaaacaggggtgtactgctcacaaggcgctcacactagtgctgttatcaaattcttatccgttcttaccaagccacagtggtgaactgcaaccaacaggtggaaccggtgaaagattggatgagcgattgcctggagaaacagaaacctactcgttgtagaaatatgtggagttctgggtaggctgcactcaagtcaaggattagcacgaccaaacaataatgcaaagttgaattatagtgcaaaacacgaaactatattgctggccacaagtgcaaaggacggatggaactagcagaatggcagtaccgtaaatattgtactagcgaggccactagtaggaatcacaagtgattttgtttttcttttttgtatgatttttttggtatttttctcagcacaagaagcaacaaaataggagctacacgaagtttcacctaaaacagagttcaaatgtggtctacagaaaatcagaaagttctctaaaaagcgtgcgagaactttgaaggattttttctttattttcctgaattttttttgacaattttgtcgaacccaaacagaccgaaggtcagtttggccggcctcagaatggtgtcaactagctcctgtaaaaatttcagatttttcggacacccgagcgaaaagttatgcccggtttaaggaaggtacctcaagttatgttttcaaacgaccgggatgaaacaaccgtatcctttctccttcgttgttttttttgtttctgttttttttgacgtaaccgaaggagaaaaacaaggaaacgatgttgactcggttttttttttctgtttttttttcgtaaccgaaggagaaaaacaaggaaacggccgttgactcggtttgttttttctgttttttttttgacgtaaccgaaggagaaaaacaaggaaacaatgttgactcggtttgtggcgtgatcaaagaggagatggtggcggcgctaggatttgaatggtggaagaacacaatgcaaccagcaacaaatgacgcgaaagcacacaaattcaacaatgcagattattgaaagaaagtgcgaggctcaaaagggtgctcggataaggtctaacctgaatttttatgtggttttgtggactgtaggaaaaaaaaactcgataaactcaccgatcaacctggaaatctgataccaattgatgaagctgaggtgcccgatctttcggcgagtagagataattccgatttggcggaagatgacccttgcgatccgactacgacgagcaagcccgaggcgccaatgcaatcgctgaaccaactccctgtggttaccgaccttgctgatgcgagatcggcctgatcgcgaagatcgtttcctgtgcg

SEQ ID NO: 697 - DNA, 880 bp, Zea mays
  source (0)...(0): Zea mays BAC clone full insert sequence contig bacm2.pk023.e24.fis1
  misc_feature (1)...(880): n = A,T,C or G
ggcatacgcactagnnnnnnnnnnnnnnnnnnnnnnnnnnnnnnnnnnnnnnnnnnnnnnnnnnnnnnnnnnnnnnnnnnnnnnnnnnnnnnnnnnnnnnnccagaaccatttctttgtttttcgcaacgaacatgtccaatccactactttaggtcccaaactcatgtttgggttggtttcgcgcaatttcgttgtcacacgtcacacattcggaaaacggttgtcgggtgcatacaaagcacgagtttttgccaccggaaccatttcttcgtttttcgcaacgaacatgcccaatctactactttaggtccaaaactcatgtttggggtggtttcgcgcaatttcgttgtcgcacgtcacccattccgaaaacggttttcggggtgcatacaaagcacgagtttttgccaccggaaccatttcttcgtttttcgcaacgaacatgcccaatcccctactttaggtccaaaaaacccgtttggggtgggttcgcgcaattttgttgtctcacatcaccccttctcaaaacgggggtcggggggtgaacaaaaaacaattttttgccccccaaaacctttttcttcttttctcacaaaaaatgccccaaccccacaatttggtgtacaacactcgtgtggggtgtgttctcgcacattttctgtgccacacctccccctctcaaaacgcgggtgtgggtgtgcacacaccccaaaatttttccccacgaaacctttttttctcttttttcaaaaaaaaatgcgcaatatcaactatttaaggcgaaaactctcgtgtgtgtggtgtttccgcactttctctctgacacactcccccactctcaaaaaaggtgtcgagtggcaaccaactcaagttttttt

SEQ ID NO: 698 - DNA, 884 bp, Zea mays
  source (0)...(0): Zea mays BAC clone full insert sequence contig bacm2.pk023.e24.fis2
  misc_feature (1)...(884): n = A,T,C or G
cccgtaacgcannnnnnnnnnnnnnnnnnnnnnnnnnnnnnnnnnnnnnnnnnnnnnnnnnnnnnnnnnnnnnnnnnnnnnnnnnnnnnnnnnnnnnnnnnnnaataaaaggatgcacacatagtgacatgctaatcactataatgtgggcatcaaagttgtgtgttatgtgtaattactagtctgcagcatttggctaccttaagagagtcatagttatagctcgagcggccagcttgatatcgaattcgagccaatatgcgagaacacccgagaaaattcatcgatgatggttgagatgtgtataagagacagnnnnnnnnnnnnnnnnnnnnnnnnnnnnnnnnnnnnnnnnnnnnnnnnnnnnnnnnnnnnnnnnnnnnnnnnnnnnnnnnnnnnnnnnnnnnnnnnnnnnnnnnnnnnnnnnnnnnnnnnnnnnnnnnnnnnnnnnnnnnnnnnnnnnnnnnnnnnnnnnnnnnnnnnnnnnnnnnnnnnnnnnnnnnnnnnnnnnnnnnnnnnnnnnnnnnnnnnnnnnnnnnnnnnnnnnnnnnnnnnnnnnnnnnnnnnnnnnnnnnnnnnnnnnnnnnnnnnnnnnnnnnnnnnnnnnnnnnnnnnnnnnnnnnnnnnnnnnnnnnnnnnnnnnnnnnnnnnnnnnnnnnnnnnnnnnnnnnnnnnnnnnnnnnnnnnnnnnnnnnnnnnnnnnnnnnnnnnnnnnnnnnnnnnnnnnnnnnnnnnnnnnnnnnnnnnnnnnnnnnnnnnnnnnnnnnnnnnnnnnnnnnnnnnnnnnnnnnnnnnnnnnnnnnnnnnnnnnnnnnnnnnnnnnnnnnnnnnnnnnnnnnnnnnnnnnnnnnnnnnnnnnnnnnnnnnnnnnnnnnnnnnnnnnn

SEQ ID NO: 699 - DNA, 967 bp, Zea mays
  source (0)...(0): Zea mays BAC clone full insert sequence contig bacm2.pk023.e24.fis3
atatggccacttaacgccaacgccagcagagcactgcccggcggcctttttcccatctctctctctctctctgatggcctgatggggtgtgcatgcctgactgactgatagatagatagatggtcaggtccgtctgatcctcatcggcctagctcaccccacgcgaaaaaagccactgctggctggcgcccagttgcgcttgcaacagtcactttagcgagccccgtccttgcgtttgccctcctcgctctgcccctgccgccgctgcgtggtggtgctggtgcatgaggcaggcgtcgtactagtgcatgcaatgcaaccgtaggagtgcgttgcgtaccctggtctgtccctgcggcctggcctgccgcccttgttcgttgcggatgcggggggtgccgggtgggtactgtactgtactactgggtagagagaagtagatatagatagatagagagagagaggtcggtcaccccgggcgcgggacacagcctctgcgaaaaagcgatccatgtcgcgcctagctttgacccggaacggatcccccaaccaggaaccagcagagcaggagggccaggccaccacctctcgccattccattcccggtcctagctagtcctgttctgttcctgtagcagtagctacggtactacgagtcctcctcgacgtcccaggcactactccactccacgcagcagcaggcagcgaacatctctcgaccagatgcatacaagctacaccctcctcggctccgatcctacccatgccggcccaggcggcctataaaagcgcacccccggcccgtcttcctcccactgcatgcccattgcccccccggccttcgccgtgccaacgacacacctcatcaccggccggaacattccacgaccgaagaaaccagtccctagctagtccacgcacgaccaacaaggcaggcgagcgacgacagtccaagcctccaaccatg

SEQ ID NO: 700 - DNA, 154 bp, Zea mays
  source (0)...(0): Zea mays BAC clone full insert sequence contig bacm2.pk023.e24.fis4
gcttggcggcggcaacacacagcgactggaggctctggtggagcggctcatcgacgacaaccgccggcaggccggcgagatcgcgcggctcaacgcccgtatggcgcgcgtgatggaaaagtgggacggcgacggcatgccgggcgcgcgggag

SEQ ID NO: 701 - DNA, 1828 bp, Zea mays
  source (0)...(0): Zea mays BAC clone full insert sequence contig bacm2.pk023.e24.fis5
ggttccggtggcaaaaactcgtgcgttgtatgcaccccgacacccgttttcggaatgggtgacgtgcgacaacgaaattgcgcgaaaccacaccaaacatgagttttggacctaaagtagtggattgggcatgttcgttgcgaaaaacgaagaaatggttccggtggcaaaaactcgtgctttgtatgcaccccgacacccgttttcggaatgggtgacgtgcgacaacgaaattgcgcgaaaccacaccaaacatgagttttggacctaaagtagtggattgggcatgttcgttgcgaaaaacgaaaaaatggttccggtggcaaaaactcgtgctttgtatgcaccccaaaaaccgttttcggaatgggtgacgtgcgacaacgaaattgcgcgaaaccaccccaaacatgatttttggacctaaagtagtaaattgggcatgttcgttgcaaaaaacaaaaaaatggttccggtggcaaaaactcgtgctttgtatgcacccgacaaccgttttccgaatgtgtgacgtgtgacaacgaaattgcgcgaaaccaacccaaacatgagtttgggacctaaagtagtggattggacatgttcgttgcgaaaaacaaagaaatggttctggtggcaaaaactcgtgctcttatgcaccccgacacccgttttcggaatgggtgacgtgcgacaacgaaattgcgcgaaaccaccccaaacatgagttttggacctaaagtagtagattgggcatgttcgttgcgaaaaacgaagaaatggttccggtggcaaaaactcgtgctttgtatgtacccgacacccgttttcggaatgggtgacgtgcgacaacgaaattgcgcgaaaccaacccaaacatgagttttggacctaaagtagtggattgggcatgttcgttgcgaaaaacgaagaaatggttccggtggcaaaaactcgtgctttgtatgcacccgacacccgttttcggaatgggtgacgtgcggcaacgaaattgcgcgaaaccacaccaaacaagagttttggacctaaagtagtggattgggcatgttcgttgcgaaaaacgaagaaatggttccggtggcaaaaactcgtgctttgtatgcaccccgacacccgttttcggaatgggtgacgtgcggcaacgaaattgcgcgaaaccaccccaaacatgagttttggacctaaagtagtggattgggcatgttcgttgcgaaaaacgaagaaatggttccggtggcaaaaactcgtgctttgtatgcacccgacacccgttttcggaatgggtgacgtgcgacaacgaaattgcgcgaaaccaccccaaacatgagttttggacctaaagtagtggattgggcatgttcgttgcgaaaaacgaagaaatggttccggtggcaaaaactcgtgctttgtatgcacccgacacccgtttttggaatgggtgacgtgcgacaacgaaattgcgcgaaaccaccccaaacatgagttttggacctaaagtagtggattgggcatgttcgttgcgaaaaacgaagaaatggttccggtggcaaaaactcgtgctttgtatgcaccccgacacccgttttcggaatgggtgacgtgcgacaacgaaattgcgcaaaaccaccccaaacatgagttttggacctaaagtagtggattgggcatgttcgttgcgaaaaacgaagaaatggttccggtggcaaaaactcgtgctttgtatgcacccgacacccgttttcggaatgggtgacgcgggacaacgaaaccgcgcgaaaccaccccaaacatgagttttggacctaaagta

SEQ ID NO: 702 - DNA, 2798 bp, Zea mays
  source (0)...(0): Zea mays BAC clone full insert sequence contig bacm2.pk023.e24.fis6
ctgcagcaagcaccatattaaatggagcatatctttcatctcccaagattgtttagtgcaaataagtacttgttggaaagctctcttcgtctactttctggcggctgaagaatcaatgggagaaaccaaacgacacgtccagaaactgtcgagagagcttcgttctccaccagaacttctttctattcctctatttaagcaactagcagccaccaaagaacttgggttttgtttgatgtaagtttagcctttgctacttccttgtaaacgcgtgtgtcggctagaccacccgaatacttgaaatgggaccccaactttatcagatccgtgcgtgtttgcttgttatcttgttcttgcttgttctcgattgcttgcaggttcaaggctgttcttggcacggcaagagcagcaacaacaggagccggtgtaactatcgctaaggcgcagcacccttgtggttgttgtagtcggatagcacaacgtcgacctccaccccaaatcgtagttatcaggagacggtgtacctgtcgctcaaggcgccacaccatcttggttgtggtagtcgggcagccaacgtcgttctccaacaagttttccacctccatcatctctcatcgaaagatcgggcacccttctacccgttgggtttatcaccaccagaaccatttcttcgtttttcgcaacgaacatgcccaatccactactttaggtccaaaactcatgtttggtgtggtttcgcgcaatttcgttgccgcacgtcacccattccgaaaacgggtgtcgggtgcatacaaagcacgagtttttgctaccggaaccatttcttcgtttttcgcaacgaacatgcccaatccactactttaggtccaaaactcatgtttggtgtggtttcgcgcaatttcgttgccgcacgtcacccattccgaaaacgggtgtcgggtgcatacaaagcacgagtttttgccaccggaaccatttcttcgtttttcgcaacgaacatgcccaatccactactttaggtccaaaactcatgtttggtgtggtttcgcgcaatttcgttgccgcacgtcacccattccgaaaacgggtgtcgggtgcgaacaaagcacgagtttttgccaccggaaccatttcttcgtttttcgcaacgaacatgcccaatccactactttaggtccaaaactcatgtttggtgtggtttcgcgcaatttcgttgtcacacgtcacccattccgaaaacgggtgtcggggtgcatacaaagcacgagtttttgccaccggaaccatttcttcgtttttcgcaacgaacatgcccaatccactactttaggtccaaaactcatgtttggtgtggtttcgcgcaatttcgttgccgcacgtcacccattccgaaaacgggtgtcgggtgcatacaaagcacgagtttttcctaccggaaccatttcttcgtttttcgcaacgaacatacccaatccactactttaggtccaaaactcttgtttggtgtggtttcgcgcaatttcgttgccgcacgtcacccattccgaaaacgggtgtcgggtgcgtacaaagcacgagtttttgccaccggaaccatttcttcgtttttcgcaacgaacatgcccaatccactactttaggtccaaaactcatgtttggggtggtttcacgcaatttcgtcctcgcacgtcacccattccgaaaacgggtgtcgggtgcatacaaagcacgagtttttgccaccggaaccatttcttcgtttttcgcaacgaacatgcccaatccactactttaggtccaaaactcatgtttggtgtggtttcgcgcaatttcgttgtcacacgtcacccattccgaaaacgggtgtcggggtgcatacaaagcacgagtttttgccaccggaaccatttcttcgtttttcgcaacgaacatgcccaatccactactttaggtccaaaactcttgtttcgtgtggtttcgcgcaatttcgttgccgcacgtcacccattccgaaaacgggtgtcgggtgcatacaaagcacgagtttttgccaccggaaccatttcttcgtttttcgcaacgaacatgcccaatccactactttaggtccaaaactcatgtttgggttggtttcgcgcaatttcgttgtcgcacgtcacccattccgaaaacgggtgtcgggtacatacaaagcacgagtttttgccaccggaaccatttcttcgtttttcgcaacgaacatgcccaatcaactactttatgtccaaaaatcatgtttggggtggtttcgcgcaatttctttgtctcacgtcacccattcctaaaaaaggtggcggggtggataaaaacaagaattttttccacccgaaccaattctttgtttttttcaaccaacaagcccaacccatcaatttatgtccgtaactcaagtttggtttggtttcgctcactttccttgtctcacgtcacccattccgaaaaaaaatgtcgggtgggtaccaaacaagaatttttttctgcccaaccatttctttcttttttttttccaaccaacccaacccatcaccttatttccgaaacacaagtttggtttgggttgtctccatctctttgtctcacgccacccactcatcaaaaaaatgggtggggggcgtacaaacaaaaaattatttctcacccacaaaaacttttctttttttttctacaaacaaaccaaaccaatcaattatttttgaacaaaaaaagttggggggggggggtccccaagtttatttggtggcacgcaccccatccttaaa

SEQ ID NO: 703 - DNA, 3708 bp, Zea mays
  source (0)...(0): Zea mays BAC clone full insert sequence contig bacm2.pk023.e24.fis7
gccaccggaaccatttcttcgtttttcgcaacgaacatgcccaatccacaactttaggtccaacactcatgtttggggtggttccgcgcaatttcgttgtcgcacgtcacccattccgaaaacggttgtcgggtgcatacaaagcacgagtttttgccaccggaaccatttcttcgtttttcgcaacgaacatgcccaatccactactttaggtccaaaactcatgtttggggtggtttcgcgcaatttcgttgtcgcaagtcacccattccgaaaacgggtgtcggggtgcatacaaagcacaagtttttgccaccggaaccatttcttcttttttcccaacgaacatgcccaatccactactttaggtccaaaactcatgtttgggttggtttcgcgcggtttcgttgtcccgcgtcacccattccgaaaacgggtgtcgggtgcatacaaagcacgagtttttgccaccggaaccatttcttcgtttttcgcaacgaacatgcccaatccactactttaggtccaaaactcatgtttggggtggtttcgcgcaatttcgttgtcgcacgtcacccattccgaaaacgggtgtcggggtgcatacaaaccacaattttttgccaccgaaaccatttcttcttttttcgcaacaaacatgcccaacccactactaatttacgtccaaaactcttggggggggtggtttcgcgctatttcgttgtcgcacgtcacccattccaaagatgggtgtctggtgcaaaccaagcattattttttgccaccggaattttttctttttttttcgcaacgaacatgccccatccactactttacgtccaaaactcatgtttggggtggtttcgcgcaatttcgttgtcgcacgtcacccattccgaaaacggttgtcgggtgcatacaaagcacgagtttttgccaccggaaccatttcttcgtttttcgcaacgaacatgcccaatccactactttaggtccaaaactcatgtttggggtggtttcgcgcaatttcgttgtcgcaagtcacccattccgaaaacgggtgtcgggtgcatacaaagcacgagtttttgccaccggaaccatttcttcgtttttcgcaacgaacatgcccaatccactactttaggtccaaactcatgtttggggtggtttcgcgcaatttcgtcgtcgcacgtcaccctttccgaaaacgggtgtcgggtgcatacaaagcacgagtttttgccaccggaaccatttcatcgtttttcgcaacgaacatgcccaatccactactttaagtccaaaactcatgtttggggtggtttcgcgcaatttcgtcgtcgcacgtcacccattccgaaaacgggtgtcgggtgcatacaaagcacgagtttttgccactggaaccatttcttcgtttttcgcaacgaacatgcccaatccactactttaggtccaaaactcatgtttggggtggttttgcgcaatttcgttgtcgcacgtcacccattccgaaaacgggtgtcggggtgcatacaaagcacgagtttttgccaccggaaccatttcttcgtttttcgcaacgaacatgcccaatccactactttaggtccaaaactcatgtttggggtggtttcgcgcaatttcgttgtcgcacgtcacccattccgaaaacgggtgtcaggtgcatacaaagcacgagtttttgccaccggaaccatttcttcgtttttcgcaacgaacatgcccaatccactactttaggtccaaaactcatgtttggggtggtttcgcgcaatttcgttgtcgcacgtcacccattccgaaaacgggtgtcggggtgcatacaaagcacgagtttttgccaccggaaccatttcttcgtttttcccaacgaacatgcccaatccactactttaggtccaaaactcatgtttggggtggtttcgcgtaatttcgttgtcgcacgtcacccattccgaaaacgggtgtcgggtgcatacaaagcacgagtttttgccaccggaaccatttcttcgtttttcgcaacgaacatgcccaatccactactttaggtccgaaactcatgtttgggttggtttcgcgcaatttcgttgccgcacgtcacccattccgaaaacgggtgtcgggtgcatataaagcacgagtttttgccaccggaaccatttcttcatttttcgcaacgaacatgcctaatccactactttaggtccaaaactcatgtttggggtggtttcgcgcaatttcgtcgtcgcacgtcacccattccgaaaacgggtgtcgggtgcatacaaagcacgagtttttgccaccggaaccatttcttcgtttttcgcaacgaacatgcccaatccactactttaggtccaaaactcatgtttggggtggtttcgcgcaatttcgttgtcgcacgtcacccattccgaaaacgggtgtcggggtgcatacaaagcacgagtttttgccaccggaaccatttcttcgtttttcgcaacgaacatgcccaatccactactttaggtccaaaactcatgtttggggtggtttcgcgtaatttcgttgtcgcacgtcacccattccgaaaacgggtgtcgggtgcatacaaagcacgagtttttgccaccggaaccatttcttcgtttttcgcaacgaacatgtccaatccactactttaggtccaaaactcatgtttgggttggtttcgcgcaatttcgttgccgcacgtcacccattccgaaaacgggtgtcgggtgcatataaagcacgagtttttgccaccggaaccatttcttcgtttttcgcaacgaacatgcctaatccactactttaggtccaaaactcatgtttggggtggttttgcgcaatttcgtcgtcgcacgtcacccattccgaaaacgggtgtcgggtgcatacaaagcacgagtttttgccaccggaaccatttcttcgtttttcgcaacgaacatgcccaatccactactttaggtccaaactcatgtttggggtggtttcgcgcaatttcgtcgtcgcacgtcaccctttccgaaaacggttgtcgggtgcatacaaagcatgagtttttgccaccggaatcatttcttcgtttttcgcaacgaacatgcccaatccactactttaggtccaaaactcatgtttggggtggtttcgcgcaatttcgttgtcgcacgtcacccattccgaaaacgggtgtcggggtgcatacaaagcacgagtttttgccaccggaaccatttcttcgtttttcgcaacgaacatgcccaatccactactttaggtccaaaactcatgtttgggttggtttcgcgcaatttcgttgtcgcaagtcacccattccgaaaacgggtgtcgggtgcatacaaagcacgagtttttgccaccggaaccatttcttcgtatttcgcaacaaacatgcccaatccactactttaggtccaaactcatgttgataaagctgaggtgcccgatctctcggcgagtagagataattccgatttggcggaagatgacccttgcgatccgactacgacgagcaagcccgaggcgccaatgcaatcgctgaaccaactccctgtggttaccgaccttgctgatgcgagatcggcctgatcacgaagatcgtttcctgtgcgcaatcgaagacgaacaagaataagatgcgagcaa

SEQ ID NO: 704 - DNA, 8516 bp, Zea mays
  source (0)...(0): Zea mays BAC clone full insert sequence contig bacm2.pk023.e24.fis8
  misc_feature (1)...(8516): n = A,T,C or G
ccctaaaccctaaaccctaaaccctaaaccctaaaccctaaaccctaaaccctaaaccctaaaccctaaaccctaaaccctaaaccctaaaccctaaaccctaaaccctaaaccctaaaccctaaaccctaaaccctaaaccctaaaccctaaaccctaaaccctaaaccctaaaccctaaaccctaaaccctaagggcgaattcgatatcaagctggccgctcgagctataactatgactctcttaaggtagccaaatgctgcagactagtaattacacataacacacaactttgatgcccacattatagtgattagcatgtcactatgtgtgcatccttttatttcatacattaattaagttggccaatccagaagatggacaagtctaggttgcggccggccgctacaggaacaggtggtggcggccctcggtgcgctcgtactgctccacgatggtgtagtcctcgttgtgggaggtgatgtccagcttggcgtccacgtagtagtagccgggcagctgcacgggcttcttggccatgtagatggacttgaactccaccaggtagtggccgccgtccttcagcttcagggccttgtgggtctcgcccttcagcacgccgtcgcgggggtacaggcgctcggtggaggcctcccagcccatggtcttcttctgcatcacggggccgtcggaggggaagttcacgccgatgaacttcaccttgtagatgaagcagccgtcctgcagggaggagtcctgggtcacggtcgccacgccgccgtcctcgaagttcatcacgcgctcccacttgaagccctcggggaaggacagcttcttgtagtcggggatgtcggcggggtgcttcacgtacaccttggagccgtactggaactggggggacaggatgtcccaggcgaagggcagggggccgcccttggtcaccttcagcttcacggtgttgtggccctcgtaggggcggccctcgccctcgccctcgatctcgaactcgtggccgttcacggtgccctccatgcgcaccttgaagcgcatgaactcggtgatgacgttctcggaggaggccatggtggcgaccggtggatccatctgcgtcaccgggcgcaccgggcgcggcggggccggcagctcgaagtcgcgctgccagaagccgacgtcgtgccagccgccgtgcttgtagccggcggcgcggagggtgccgcgggcggtgtagccgagggcctcgtggaggcgcacggacgggtcgttcgggaggccgatcacggccaccacggacttgaagccctgggcctccatgctcttgaggaggtgggtgtagagggtggagccgaggccgaggcgctggtggcggtgggacacgtacacggtggactccacggtccagtcgtaggcgttgcgggccttccacgggccggcgtaggcgatgccggccaccacgccctccacctcggccacgagccacgggtagcggtcctggaggcgctccaggtcgtcgatccactcctgcggggtctgcggctcggtgcggaagttcacggtggaggtctcgatgtagtggttcacgatgtcgcacacggcggccatgtcggcggcggtggccgggcggatctcgacggggcggcgctcgggggacatggtgtcgtgtggatccccggcggtcgacctgcagaagtaacaccaaacaacagggtgagcatcgacaaaagaaacagtaccaagcaaataaatagcgtatgaaggcagggctaaaaaaatccacatatagctgctgcatatgccatcatccaagtatatcaagatcaaaataattataaaacatacttgtttattataatagataggtactcaaggttagagcatatgaatagatgctgcatatgccatcatgtatatgcatcagtaaaacccacatcaacatgtatacctatcctagatcgatatttccatccatcttaaactcgtaactatgaagatgtatgacacacacatacagttccaaaattaataaatacaccaggtagtttgaaacagtattctactccgatctagaacgaatgaacgaccgcccaaccacaccacatcatcacaaccaagcgaacaaaaagcatctctgtatatgcatcagtaaaacccgcatcaacatgtatacctatcctagatcgatatttccatccatcatcttcaattcgtaactatgaatatgtatggcacacacatacagatccaaaattaataaatccaccaggtagtttgaaacagaattctactccgatctagaacgaccgcccaaccagaccacatcatcacaaccaagacaaaaaaaagcatgaaaagatgacccgacaaacaagtgcacggcatatattgaaataaaggaaaagggcaaaccaaaccctatgcaacgaaacaaaaaaaatcatgaaatcgatcccgtctgcggaacggctagagccatcccaggattccccaaagagaaacactggcaagttagcaatcagaacgtgtctgacgtacaggtcgcatccgtgtacgaacgctagcagcacggatctaacacaaacacggatctaacacaaacatgaacagaagtagaactaccgggccctaaccatggaccggaacgccgatctagagaaggtagagagggggggggggggaggacgagcggcgtaccttgaagcggaggtgccgacgggtggatttgggggagatctggttgtgtgtgtgtgcgctccgaacaacacgaggttggggaaagagggtgtggagggggtgtctatttattacggcgggcgaggaagggaaagcgaaggagcggtgggaaaggaatcccccgtagctgccggtgccgtgagaggaggaggaggccgcctgccgtgccggctcacgtctgccgctccgccacgcaatttctggatgccgacagcggagcaagtccaacggtggagcggaactctcgagaggggtccagaggcagcgacagagatgccgtgccgtctgcttcgcttggcccgacgcgacgctgctggttcgctggttggtgtccgttagactcgtcgacggcgtttaacaggctggcattatctactcgaaacaagaaaaatgtttccttagtttttttaatttcttaaagggtatttgtttaatttttagtcactttattttattctattttatatctaaattattaaataaaaaaactaaaatagagttttagttttcttaatttagaggctaaaatagaataaaatagatgtactaaaaaaattagtctataaaaaccattaaccctaaaccctaaatggatgtactaataaaatggatgaagtattatataggtgaagctatttgcaaaaaaaaaggagaacacatgcacactaaaaagataaaactgtagagtcctgttgtcaaaatactcaattgtcctttagaccatgtctaactgttcatttatatgattctctaaaacactgatattattgtagtactatagattatattattcgtagagtaaagtttaaatatatgtataaagatagataaactgcacttcaaacaagtgtgacaaaaaaaatatgtggtaattttttataacttagacatgcaatgctcattatctctagagaggggcacgaccgggtcacgctgcactgcaggcatgcaagctgatctgnnnnnnnnnnnnnnnnnnnnnnnnnnnnnnnnnnnnnnnnnnnnnnnnnnnnnnnnnnnnnnnnnnnnnnnnnnnnnnnnnnnnnnnnnnnnnnntggccgaagactactgagtgtcttcttacgatgaagacatgaacgtgtcttcaactagaggcgcgcctgacttaattaatgagcggccggccgcagttccatcttggtggacaaaggtgacccggaccgaagctccacgagaggaaccgttgattcacacaattggtcatcgcgcttggttgaaaagccagtggcgcgaagctaccgtgtgccggattatgactgaacgcctctaagtcagaatccaagctagcaaccggcgcctctgctcgccgcccgccccgacccacgttagggcgttcgcgccccaagggcccgtgccattggctcagcccgcccggtcgacgcgccgcggcgggccgcctcgaagctcccttcccaacgggcggcgtgctgaatcctttgcagacgacttaaaacgcgacggggcattgtaagtggcagagtggccttgctgccatgatccactgagatccagccccgcgtcgcacggattcgtccctccccccactctacacagcgcccagcgactaggtttcgaacccacgggagaggggcaccgatcttccgaacggaaacgtccaaggcgcagcgtggcaagaggccgaaaaccgccgtgagttcgtgcacgaccacaagaaaagctaagtcccagcgtgtggaaagaaaccgaagctcctacgtatgccttgggtgaagggcacgatggaacgttggcgatgggcggcagggctgttcggccacgcgtctaggctgaaaacgaggggttcgccatggcgcgcgggccgcaaacggcgaccggggcacgacctcgaaaataggctaagtccaagcgtgtggaatggaaagacaccgaagctaaggtgtatgtatgtcttgagtgaagggcacggtggaacggagggaaaacgacacggaggcgcgcgacgacgggcggcatggctgttcggccttgcgtttgggccgaaaacgatgggttcgccatggcgcacgggccgaaaaatgaggttcaggcacgaccccgaaaataagctaagtccaagcgtgtggaaaggcaccgaagctaatatgtatgtcttgggtgaagggcacggaggaacagagggaaaacggcacggaggcgcgcggcgacgggcggcagggctgttcggccttgcgtctgggctgaaaacgaggggttcgccatggcgcacgggccgaaaactgaggctcgggcatgacctcgaaaataagctaagtccaagcgtgtggaatggaaagacaccgaagctaaggtgtttgtatgtcttgagtgaagggcacggtggaacggagggaaaacgacacggaggcacgcgacgacgggcggcatggctgttcggccttgcgtcctggctgaaaacgaggtgttcgccatggcgcacgggccgaaaactgaggctcaggcacgaactcgaaaataagctaagtccaagcgtgtggaaagacacggaacctaaagtgtatgtctttggtgaagggcacagtggaacggagggaaaacgacacggaggcacgcgacgaactgaggctccggcacggaggcgcacggcgacgggcggcagggatgttcgtccttgtgtttgggctgaaaacgaggtgttcgccatggcgcgtggtccgaaaacaacggttcggccacggtccgaaaacgggctaagtcccagcgtttggaaagacaccgaacctaaagtgcatgtctggagtgaaggtcaaggtggaacggagggaaaacgggaggaggtgcgcggcgacgggcggcatggctgttcggccttgcgtttgggctgaaaacgagggtttcgccatggcgcgcgggccgaaaacggcggctggggcacggcctcggaaataagctaagtccaagcgtgtggaaagacaccgaagctaatgtgtatgtcttgggtgaagggcacggtggaacggagggaaaacgacacggaggcgcgcggcgacgggcggcatggctgttcggccttgcgtttgggctgaaaacgagggtttcgccatggcgcgtgggccgaaaacagcggctggggcacggcctcggaaataagctaagtccaagcgtgtggaaagacaccgaagctaatgtgtatgtcttgggtgaagggcaagatggaacggagggaaaacgacacggaggcccgcggcgacgggcggcagggctgttcggcaatgcgtctgggctaaaaacaggtggttcgccatggcgcgcgggccggaaatggtggctgtggcacgaacccgaaaataaactaagtccaagcatgtggaaacacaccgaacctaaagtggatgtctttggtgaagggcacggtggaacggagggaaaacgacacggaggcacgcggcaacgggcggtagggctgttcggccttgcgtatgggctgaaaacgaggggttcgccatggcgcacgggccgaaatcggaggctcgggcacgacctccaaaattagctaagtccaagcttgtggaaagacaccgaacctaaagtgcatgtcttaagtgaagggcaaggtggaacggagggaaaacgggagcaggcgcgtggcgacgggcggcagggctgttcggccttgcgtttgggctgaaaacgaggggttcgccatggcgcacgggccgaaaactgaggctagggcacgaccccgaaaataagctaagtccaagcatgtggaaagacaccgaacctaaagtgcatgtcttgagtgaagggcacggtggaacggagggaaaacgggaggaggcgcgctgccacgggcggcagggctgttcggccttgcgtttgggctgaaaacgaggtgttcgccatggcgcgcgggccgaaaactgaggctcgggcacgaccccgaaaataagctaagtccaagcatgtggaaagacaccgaacctaaagtgcatgtcttgagtgaagggcaaggtggaacggagggaaaacgggaggaggcgcgctgccacgggcggcagggctgttcggccttgcgtttgggctgaaaacgaggtgttcgccatggcgcgcgggctgaaaactgaggttcggccacggccgcgaaaacgggctaagtccaagcgtgtggaaagacaccgaacctaaagtgcatgtcttgagtgaagggcaaggtggaacggagggaaaacgggaggaggcgcgctgccacgggcggcagggctgttcggccttgcgtttgggctgaaaacgaggtgttcgccatggcgcgcgggctgaaaactgaggttcggccacggccgcgaaaacgggctaagtccaagcgtgtggaaagacaccgaacctaaagtgcatgtcttgagtgaagggcaaggtggaacggagggaaaacgggaggaggcgcgctgccacgggcggcagggctgttcggccttgcgtttgggctgaaaacgaggtgttcgccatggcgcgcgggctgataactgaggttcggccacggccgcaaaaacgggctaagtccaagcatgtggaaagacaccgaacctaaagtgcatgtcttgagtgaagggcaaggtggaacggagggaaaacgggaggaggcgcgctgccacaggcggcagggctgttcggccttgcgtttgggctgaaaacgaggggttcgccatggcgcacgggccgaaaactgaggctcgggcacgaccccgaaaataagctaagtccaagcatgtggaaagacaccgaacctaaagtgcatgtcttgagtgaagggcacggtggaacggagggaaaacggctcggaggcgcgctgccacgggtggcagggctgttcggccttgcgtttgggctgaaaacgaggggttcgccatggcgcacgggccaaaaacggattttcggccacggccgcaaaaacgggcacgtggaagggcacgggaccctcccgtggtccccccgcgtgagacatcgaagttcgggtcgacccgtgagggaaaacgggtcacgctagcgaaacccctgattctgagcaaaaacgttgtgtccggccatcttagatgggtttcgtggcgtccagggaaaataccctggttttctgaaggctgaactccccgaagtcctgggagggggtatgcccctcaggtatagtagggggtagggaactcgtgcagccgaaacccgggcggaacgctgctgaaaccatagcgtttccagcgtctcctccaggtctcctcggccgagccccgcaccccctcgcggcctagccgtggccggtcagcaccctaccgcgcccagctccagctggcgctgttggctgcctggccggccatggttcggccgtgacgcagccacgaccggctatggctggctagcgccggccagacgccctggacgagtggctgcactgtgggatggcccgttgctcgatgcgttttccatttctcccgtgctcggtggaccttcggtcgccgtcctcgcaagtagacccgccgcgcccagcgcggagggatgctttggatggctcgaccgtagcggctacgctggcgcatgagttgtcttggacccgtgactgcttggaggacccccgctgccgtgcagccgactccccggcgcccgtgtcccatcgttcgtgcgggcatcctgtgcctgctgcattgagaagtgcttgcgtgctgctacacgtcccacgggaagccgtggggatcctctagagcttgccaacgactacgcactagccaacaagagcttcagggttgagatgtgtataagagacag

SEQ ID NO: 705 - DNA, 22627 bp, Zea mays
  source (0)...(0): Zea mays BAC clone full insert sequence contig bacm2.pk023.e24.fis9
atggttgctgcatttgggtcgagttgctggtctaaagttttcttaccgctagagtttcgagttcgcgccaccttgtttcaatcaccagtttagacctcttgctgcaattcaaccaaaaagaagagaaagcaaaaggcgagtgcataaaaaaagccgcactaatcagcaaaacaaaaaaagacacgtgcaaaaaaagagagaaaaaccagttctgaattttggtagataaaatttgtaagtgcaacaaaacaaaaggcagtttgtgtgccttctttttatagtttcataaatcagattgctgttctcagcttttggtgatactatttgtgtaacggctcgcgtctctattacggtttggactaggaccagcacaacaccattgtggaacgtttattcaacttgttgtggctaatgtggtactagctattccttctattgttttatcagccacctataaatccacaaatttttctacaacaccacgaggttgtgctagctgccaccgttgttgttgttcttgctgtttgccggcacctcctgtattgcgtggtgagaatttgcttaactagtttgagaatgagagattacaacaatgattccttgtagtttataggatcaaagatattttttattgttttcttgtctttactaaacatggcaggtgatatgaagatttttgagacaaccaaacattatattcaaggcatcattcaacacttgccttcatatgccggtaaattcgatcctcatgcatacattgattgggagctcaaggtagataaggaatttgatgagcatgatctatctcaaaaacaaaagatttatattgcctctaatgtgttaactgagcatgcattgatggaatggaaatacatttgtaggcacaacaaagttccacagtcttggaaagacttcaaacttcattttagggatgcattcattcctgcatactatgctgattatttgctttctaaattagacaccttaaagcagggtgctaggactgtaaaagaatattatcatgattttaaaatttgtaccatgtttgctggtttagatgaatgcatggaagatgtaatgacaaggtttacaaacggactcaattctgaaattcatactatggtcatgcatgaaacttatggacacctttctcacttgtttttgcttgcatgtaaagctgaaaaagagatcgtgttatacaattatacatgcaccgaacatgcgacacatagttcctcttttttgtctcctcaacatgctgaacaagagcacaaaatagagaaaattgatgttgtttttccgtcatcacaagaagtattgttggctgacccttgtgatagcgaagagttggtggataattcacttttattcaggaaacaactagtgaatgaacatgttacatctgatattgaaccaaacattttggctaaaaaggaacatgtcatttgtattgcaaacgaaactgaagaaataaatttgctctcttctttaaatacttggggctatattgagtttgatgatctttttgagctcggtaatttggaaaatattttatttgctagatcaactataccttgtccttctcatgttatattttacattgctggcaagtacaacaacataggacaatttcttgtgcatagaatttttatttcatctagatatgttgtttcttcactttgtgcaaataagatattggtatgttctcaagaagaaaagaatctcttgtttccatgtactttagtagaagtttcaagtttatatttgaaagacattgataaaagcttagtcatcaacatcaatcatgatgcaaaaccgaggacggtttgctgtcaagaaggggagaatgatgagaacataacccgcacagatatggccatgttaatggctcctgctacaaagacattgaggaacaaagaagttgattggggtccaagtaatgatatttccaacatttccaaccaagcaagcacatcatcaaatttaaagatatacttgggtgaggagtgcacactagagtcgaggacgactctattacaagaaggggaggatgatgaggacatcactgccatcaatacaaccacaccagcgacccccttcaccatttaatcatggaccagtgaaacgagtccgtgcacgtaaatttaattatcaggtgaactcgttccttgttgttgaagctaatcattccttaaatgaggtattaataccttgtgattactttattatgctaaggtgtttgggaggtaaaccatctagaatttgagaaggcaacaaggcaataaaagctgctccacttgaagggatttcgtaactgcagcaagtgcaagttgaagaggtcatatctttcaactcccaaggccaatgaaggcaaataagcacttgatggaaagcactcttcgtctacttcttggtggagaaagaatcaattagagataccaaatgaggcgtccagaaactgtcgagagaacttcttgactccaccagtccgagggaattcgtaactgcagcaagcaccatattaaatggagcatatctttcatctcccaaggttgtttagtgcaaataagtacttgttggaaagctctcttcgtctactttctggcggctgaagagtcaatgggagaaaccaaacgacacgtccagaaactgtcgagagagcttcgttctccaccagaacttctttctattcctctatttaagcaactagcagccaccaaagaacttgggtttttgtttgatgtaagtttagcctttgctacttccttgtaaacgcgtgtgtcggctagaccacccggatacttgaaacagaaccccaaatctatcagatccgtgagcgtctgcgttttatcttgttcttgcttgttctcgattgcttgcaggttcaaggttgttcttggcacggcaagagcagcaacaacaggagccggtgtaactatcgctaaggcgcagcacccttgtggttgttgtagtcggatagcacaacgtcgacctccaccccaaatcgtagttatcaggagacggtgtacctgtcgctcaaggcgtcacaccatcttggttgtggtagtcgggcagccaacgtcgttctccaacaagttttccacctccatcatctctcatcgaaagatcgggcacccttctacccgttgggtttatcacgtagttatcaggagacggtgtacctgtcgcacaaggcgccacaccatcttggttgtggtagtcgggcagccaacgtcgttctccaacaagttttccatctccatcatctctcatcgaaagatcgggcacccttctacccgttgggtttatcagtgacgtgcgacaacgaaattgcgcgaaaccaccccaaacatgagttttggacctaaagtagtggattgggcatgttcgttgcgaaaaacgaagaaatggttccggtggcaaaaactcgtgctttgtatgcacccgacacccgttttcggaatgggtgacgcgcgacaacgaaaccgcgcgaaaccaacccaaacatgagttttggacctaaagtagtggattgggcatgttcgttgcgaaaaacgaagaaatggttccggtggcaaaaactcgtgctttgtatgcaccccgacacccgttttcggaatgggtgacttgcgacaacgaaattgcgcgaaaccaccccaaacatgagttttggacctaaagtagtggattgggcatgttcgttgcgaaaaacgaagaaatggttccggtggcaaaaactcgtgctttgtatgcacccgacaaccgttttcggaatgggtgacgtgcgacaacgaaattgcgcgaaaccaccccaaacatgagttttggacctaaagtagtggattgggcatgttcgttgcgaaaaacgaagaaatggttccggtggcaaaaactcgtgctttgtatgcacctgacacccgttttcggaatgggtgacgtgcgacaacgaaattgcgcgaaaccaccccaaacatgagttttggacctaaagtagtggattgggcatgttcgttgcgaaaaacgaagaaatggttccggtggcaaaaactcgtgctttgtatgcaccccgacacccgttttcggaatgggtgacgtgcgacaacgaaattgcacaaaaccaccccaaacatgagttttggacctaaagtagtggattgggcatgttcgttgcgaaaaacgaagaaatggttccagtggcaaaaactcgtgctttgtatgcacccgacacccgttttcggaatgggtgacgtgcgacaacgaaattgcgcgaaaccaccccaaacatgagttttggacctaaagtagtggattgggcatgtttgttgcgaaaaacgaagaaatggttccggtggcaaaaactcgtgctttgtatgcacctcacacccgtttttggaatgggtgacgtgtgacaacgaaattgcgcgaaaccacaccaaacatgagttttggacctaaagtagtggattgggcatgttcgttgcgaaaaacgaagaaatggttccggtggcaaaaactcgtgctttgtatgcacccgtcacccggtttcggaatgggtgacgtgcgacaacgaaattgcgcgaaaccacgccaaacatgagttttggacctaaagtagtggattgggcatgttcgttgcgaaaaacgaagaaatggttccggtggcaaaaactcgtgctttgtacgcacccgacacccgttttcggaatgggtgacgtgcggcaacgaaattgcgcgaaaccacaccaaacaagagttttggacctaaagtagtggattgggcatgttcgttgcgaaaaacgaagaaatggttccggtggcaaaaactcgtgctttgtatgcaccccgacacccgttttcggaatgggtgacgtgcggcaacgaaacagagcgaaaccaccccaaacatgagttttggacctaaagtagtggattgggcatgttcgttgcgaaaaacgaagaaatggttccggtggcaaaaactcgtgctttgtatgcacccgacacccgttttcggaatgggtgacgtgcgacagcgaaattgcgcgaaaccacgccaaacatgagttttcgacctaaagtagtggattgggcatgttcgttgtgaaaaacgaagaaatggttccggtggcaaaaactcgtgcgttgtatgcaccccgacacccgttttcggaatgggtgacgtgcgacaacgaaattgcgcgaaaccacaccaaacatgagttttggacctaaagtagtggattgggcatgttcgttgcgaaaaacgaagaaatggttccggtggcaaaaactcgtgctttgtatgcaccccgacacccgttttcggaatgggtgacgtgcgacaacgaaattgcgcgaaaccacaccaaacatgagttttggacctaaagtagtggattgggcatgttcgttgggaaaaacgaagaaatggttccggtggcaaaaactcgtgctttgtatgcaccccgacacccgttttcggaatgggtgacgtgcgacaacgaaattgcgcgaaaccaccccaaacatgagttttggacctaaagtagtggattgggcatgttcgttgcgaaaaacgaagaaatggttccggtggcaaaaactcgtgctttgtatgcacccgacacccgttttcggaatgggtgacgtgcggcaacgaaattgcgcgaaaccaacccaaacatgagttttggacctaaagtagtggattgggcatgttcgttgcgaaaaacgaagaaatggttccggtggcaaaaactcgtgctttgtatgcacccgacacccgttttcggaatgggttgagtgcggcaaccaaattgcgcgaaaccaacccaaacatgagttttggacataaagtagtggattgggcatgttcgttgcgaaaaacgaagaaatggtctcggtggcaaaaactcgtgctttgtatgcaccccgacaaccgttttcagaatgggtgacgtgcgacaacaaaattgcgcgaaaccaccccaaacatgagttttggacctaaagtagtggattgggcatgttcgttgcgaaaaacgaagaaatggttccggtggcaaaaactcgtgctttgtatgcacccgacacccgttttcgaaatgggtgacgtgcgacaacaaaattgcgcgaaaccacgccaaatatgagttttggacctaaagtagtggattgggcatgtttgttgcgaaaaacgaagaaatggttccggtggcaaaaactcgtgctttgtatgcacccgacacccgttttcggaatgggtgacgtgcgccaacgaaattgcgcgaaaccacccaaacatgagttttggacctaaagtagtggattgggtatgttcgttgcgaaaaacgaagaaatggttccggtggcaaaaactcgtgctttgtatgcaccccgacaaccgttttcagaatgggtgacgtgcggcaacgaaattgcgcgaaaccacaccaaacatgagttttggacctaaagtagtggattgggcatgttcgttgcgaaaaacgaagaaatggttccggtggcaaaaactcgtgctttgtatgcacctgacacccgttttcggaatgggtgacgtgcgacaacgaaattgcgcgaaaccacgccaaacatgagttttggacctaaattagtggattgggcatgttcgttgcgaaaaacgaagaaatggttccggtggcaaaaactcgtgctttgtatgcacccgacacccgttttcggaatgggtgacgagtgacaacgaaattgcgcgaaaccacactaaacatgatttttggacctaaagtagtggtttgggcatgttcgttgcgaaaaacgaagaaatggttccggtggcaaaaactcgtgctttgtgtgcacctgacacccgttttcggaatgggtgacgtgcgacaacgaaattgcgcgaaaccacgccaaacatgagttttggaccgaaagtagtggattgggcatgttcgttgcgaaaaacgaagaaatggttccggtggcaaaaactcgtgctttgtatgcaccccgacacccgttttcggaatgggtgacgtgcgacaacgaaattgcgcgaaaccaccccaaacatgagttttggacctaaagtagtggattgggcatgtttgttgcgaaaaacgaagaaatggttccggtggcaaaaactcgtgctttgtatgcacctcacacccgtttttggaatgggtgacgtgtgacaacgaaattgcgcgaaaccaccccaaacatgagttttggacctaaagtagtggattgggcatgttcgttgcgaaaaacgaagaaatggttccggtggcaaaaactcgtgctttgtatgcacccgacacccgttttcggaatgggtgacgtgcgacgacgaaattgcgtgaaaccaccccaaacatgagttttggacctaaagtagtggattgggcatgttcgttgcgaaaaacgaagaaattattccggtggcaaaaactcgtgctttgtacgcacccgacacccgttttcggaatgggtgacgtgcggcaacgaaattgcgcgaaaccacaccaaacaagagttttggacctaaagttgtggattgggcatgttcgttgcgaaaaacgtgatgtgcacccgttgggtgattgcccgatctttcgatgagagggtgtggaataactcgattgggggaggagacgacgttcacggcccgactacagccttccaaagacgctgcgccttagcaaccgatacaccacctcctatggctgtcacgatcttgtggagcgtgacaccctggccactagggcactcgtcctgcaagcaatcgaagaactagcaagaacaagtagaacaagtactgaattaccagatctaaatgtaggtttaaagatcaaactacaatatggtggggttccgaagacaagaagacgggcggctgaactagcacgcgcgcttgcaagcaagtagcgagagctaaacttgatctaaacaaaacccctgttcttggtggcggctagggggtttataaacatgggaggacgaccacaagggtattggggtcgtgctgcaaccctaggatgcgtccctaatggacctaacttgatacacgacccattgggccaaaatagggtgacacagcaccatgggcagaaaaggcaggaaatgtctcggtaagaaaacaatgattacggcggcctcagaacagatatgactataattccggatccatatgaaagtagacttgataagctttccatgttgtgcttgaacattccaatccgagcccgcatctgaccgtggtgaccgtcacaagttggtgttcttctgcagtccgaatccagcatgttcaaatccttttccctttcggtcttctccctgattcctaagcaaaacaagagtgcacgggtctccatggtctaaatatgatggacatgaactcaagagtgtaatcacctgatggttgagttgacgagcacgagcgcgagtaatgggaccagaaattggtacttgtattggtatagatgcatcagtagtgtggatgtcttcatcaaaacgaagaaatggttccggtggcaaaaactcgtgctttgtatgcacccgacacccgttttcggaatgggtgacgtgcggcaacgaaattgcgcgaaaccacaccaaacatgagttttggacctaaagtagtggattgggcatgttcgttgcgaaaaacgaagaaatggctccggtggcaaaaactcgtgctttgtatgcacccgacaccctttttcggaatgggtgacgtgtgacaacgaaattgcgcgaaaccacaccaaacatgagttttggacctaaagtagtggattgggcatgttcgttgcaaaaaacgaagaaatggttccggtggcaaaaactcgtgctttgtatgcacctgacacccgttttcggaatgggtgacgtgcgacaacgaaattgcgcgaaaccacgccaaacatgagttttggacctaaattagtggattgggcatgttcgttgcgaaaaacgaagaaatggttccggtggcaaaaactcgtgctttgtatgcacccgacacccgttttcggaatgggtgacgagtgacaacgaaattgcgcgaaaccacaccaaacatgatttttggacctaaagtagtggattgggcatgttcgttgcgaaaaacgaagaaatggttccggtggcaaaaactcgtgctttgtgtgcacatgacacccgttttcggaatgggtgacgtgcgacaacgaaattgcgcgaaaccacgccaaacatgagttttggaccgaaagtagtggattgggcatgttcgttgcgaaaaacgaagaaatggttccggtggcaaaaactcgtgctttgtatgcaccccgacacccgttttcggaatgggtgacgtgcgacaacgaaattgcgcgaaaccaccccaaacatgagttttggacctaaagtagtggattgggcatgtttgttgcgaaaaacgaagaaatggttccggtggcaaaaactcgtgctttgtatgcacccgacacccgttttcggaatgggtgacgtgcgacaacaaaattgcgcgaaaccacaccaaacatgagttttggacctaaagtagtggattgggcatgttcgttgcgaaaaacgaagaaatggttccggtggcaaaaactcgtgctttgtatgcacctgacacccgttttcggaatgggtgacgcgcgacaacgaaattgcgcgaaaccacaccaaacatgagttttggacctaaagtagtggattgggcatgttcgttgcgaaaaacgaagaaatggttccggtggcaaaaactcgtgctttgtttgcacctgacacccgttttcggaatgggtgacgtgcgacaacgaaattgcgcgaaaccaccccaaacatgagttttggacctaatgtagtggattgggcatgttcgttgcgaaaaacgaagaaatggttccggtggcaaaaactcgtgctttgtatgcacccgacacccgttttcggaatgggtgatgtgcgacaacgaaattgcgcgaaaccaccccaaacatgatttttggacctaaagtagtggattgggcatgttcgttgcgaaaaacgaagaaatggttccggtggcaaaaagtcgtgctttgtatgcaccccggcaaccgttttcagaatgggtgacgtgcgacaacgaaattgcgcgaaaccaccccaaacatgagttttggacctaaagtagtggattgggcatgttcgttgcgaaaaacgaagaaatggttccggtggcaaaaactcgtgctttgtatgcacccgacacccgttttcggaatgggtgacgtgcggcaacgaaattgcgcgaaaccaccccaaacatgagttttggacctaaagtagtggattgggcatgttcgttgcgaaaaacgaagaaatggttccggtggcaaaaactcgtgctttgtatgcacctgacacccgttttcgtaatgggtgacgcgcgacaacgaaactgcgcaaaaccaccccaaacatgagttttggacctaaagtagtggattgggcatgttcgttgcgaaaaacgaagaaatggttccggtggcaaaaactcgtgctttgtatgcaccccaacacccgttttcggaatgggtgacgtgcgacaacgaaattgcgcaaaaccaccccaaacatgagttttggacctaaagtagtggattgggcatgttcgttgcgaaaaacaaaaaaatggttccggtggcaaaaactcgtgctttgtatgcacccgacacccgttttcggaatgggtgacgtgcgacaacgaaattgcgcgaaaccaccccaaacatgagttttggacctaaagtagtggattgggcatgttcgttgcgaaaaacgaagaaatggttccggtggcaaaaactcgtgctttgtatgcacccgacacccgttttcggaatgggtgacttgcgacaacgaaattgcgcgaaaccaccccaaacatgagttttggacctaaagtagtggattaggcatgttcgttgcgaaaaacgaagaaatggttccggtggcaaaaactcgtgctttatatgcacccgacacccgttttcggaatgggtgacgtgcggcaacgaaattgcgcgaaaccaacccaaacatgagttttggacctaaagtagtggattgggcatgttcgttgcgaaaaacgaagaaatggttccggtggcaaaaactcgtgctttgtatgcaccccaacacccgttttcggaatgggtgacgtgcgacaacaaaattgcccgaaaccaccccaaacatgatttttggacctaaagtagtggattgggcatgttctttgcgaaaaacaaaaaaatgattccggtggcaaaaactcatgctttgtatgcacccgacacccgttttcggaaagggtgacgtgcgacaacaaaattgcgcgaaaccaccccaaacatgagtttggacctaaagtagtggattaggcatgttcgttgcgaaaaacgaagaaatggttccggtggcaaaaactcgtgctttgtatgcacccgacacccgttttcggaatgggtgacgtgcggcaacgaaattgcgcgaaaccaacccaaacatgagttttggacctaaagtagtggattgggcatgttcgttgcgaaaaacgaagaaatggttccggtggcaaaaactcgtgctttgtatgcacccgacacccgttttcggaatgggtgacgtgcgacaacgaaattgcgcgaaaccaccccaaacatgagttttggacctaaagtagtggattgggcatgttcgttgcgaaaaacgaagaaatggttccggtggcaaaaactcgtgctttgtatgcacccgacacccgttttcggaatgggtgacgtgcgacaacgaaattgcgcgaaaccaccccaaacatgagttttggacctaaagtagtggattgggcatgttcgttgcgaaaaacgaagaaatggttccggtggcaaaaactcgtgctttgtatgcaccccgactcccgttttcggaatgggtgacgtgcgacaacgaaattgcgcgaaaccaccccaaacatgagttttggacctaaagtagtggattgggcatgttcgttgcgaaaaacgaagaaatggttccggtggcaaaaactcgtgctttgtatgcacccgacacccgttttcggaatgggtgacgtgcggcaacgaaattgcgcgaaaccaacccaaacatgagttttggacctaaagtagtggattgggcatgttcgttgcgaaaaacgaagaaatggttccggtggcaaaaactcgtgctttgtatgcacttgacacccgttttcgtaatgggtgacacgcgacaacgaaactgcgcaaaaccaccccaaacatgagttttggacctaaagtagtggattgggcatgttcgttccgaaaaacgaagaaatggttccggtggcaaaaactcgtgctttgtatgcaccccaacccccgttttcggaaagggtgacgtgcgacgacgaaattgcgcgaaaccaccccaaacatgagtttggacctaaagtagtggattgggcatgttcgttgcgaaaaacgaagaaatggttccggtggcaaaaactcgtgctttgtatgcacccgacacccgttttcggaatgggtgacttgcgacaacgaaattgcgcgaaaccaccccaaacatgagttttggacctaaagtagtggattgggcatgttcgttgcgaaaaacgaagaaatggttccggtggcaaaaactcgtgctttgtatgcacccgacaaccgttttcggaatgggtgacgtgcgacaacgaaattgcgcgaaaccaccccaaacatgagttttggacctaaagtagtggattgggcatgttcgttgcgaaaaacgaagaaatggttccggtggcaaaaactcgtgctttgtatgcacctgacacccgttttcggaatgggtgacgtgcgacaacgaaattgcgcgaaaccaccccaaacatgagttttggacctaaagtagtagtggattgggcatgttcgttgcgaaaaacgaagaaatggttccggtggcaaaaactcgtgctttgtatgcaccccgacacccgttttcggaatgggtgacgtgcgacaacgaaattgcgcgaaaccaccccaaacatgagttttggacctaaagtagtggattgggcatgttcgttgcgaaaaacgaagaaatggttccggtggcaaaaactcgtgctttgtatgcacccgacacccgttttcggaatgggtgacgcgggacaacgaaaccgcgcgaaaccaacccaaacatgagttttggacctaaagtagtggattgggcatgttcgttgcgaaaaacgaagaaatggttccggtggcaaaaactcgtgctttgtatgcaccccgacacccgttttcggaatgggtgacttgcgacaacgaaattgcgcgaaaccaccccaaacatgagttttggacctaaagtagtggattgggcatgttcgttgcgaaaaacgaagaaatggttccggtggcaaaaactcgtgctttgtatgcacccgacaaccgttttcggaatgggtgacgtgcgacaacgaaattgcgcggaaccaccccaaacatgagtgttggacctaaagttgtggattgggcatgttcgttgcgaaaaacgaagaaatggttccggtggcaaaaactcgtgctttgtatgcacccgacacccgttttcggaatgggtgacgtgcgacgacgaaattgcgcgaaaccaccccaaacatgagttttggacctaaagtagtggattaggcatgttcgttgcgaaaaatgaagaaatggttccggtggcaaaaactcgtgctttgtatgcacccgacacccgttttcggaaagggtgacgtgcgacgacgaaattgcgcgaaaccaccccaaacatgtgatgcggacatcaacaccaacacgagcacatctacaccagcagcaccttctccagcccaggcgccaccccttccacctgggccagtgactcgggcccgtgcaagagaattgaactacatcatgttgttaaagaacgaaggcccggaagaatagacgaccagcccaattgcggcccataatggacgacctagggttggccgcccctaggggctgcgccccctctctatttattcaggagctgcgcctcctttatttcctgagttttgttttacgttagccttagctactctcgaacacgcgctaatctgcgctgtcttcgtgtattcagaactccaccctcgagtaatagattagattgctcgcatcttattcttgttcgttcttcgattgcgcacaggaaacgatcttcgtgatcaggccgatctcgcatcagcaaggtcggtaaccacagggagttggttcagcgattgcattggcgcctcgggcttgctcgtcgtagtcggatcgcaagggtcatcttccgccaaatcggaattatctctactcgccgaaagatcgggcacctcagcttcatcaattggtatcagatttctaggttgatcggtgagtttatcgagcgtttttttttcctacagtccacaaaaccacataaaaattcaggttagatcttatcccagcacccttttgagcctcgcactttctttcaataatctgcattgttgaatttgtgtgctttcgcgtcatttgttgctggttgcattgtgttcttccaccattcaaaccctagcgccgccaccatctctcgtttgatcacaccacaaaccgagtcaacattgtttccttgtttttctccttcggttacgtcaaaaaaaaacagaaaaaacaaaccgagtcaacggctgttttccttgattttctccttcggttacgaaaaaaaaacagaaaaaaaacagaaaaaaaaacaaaccgagtcaacatcgtttccttgtttttctccttcggttacgtaaaaaaaaacagaaacaaaaaacaacgaaggagaaaggatacggttgtttcattccggtcgtttgaaaacataatttgaggtaccttccttaaaccgggcataacttttcgctcgggtgtccaaaaaatctgaaatttttacaggagctagttgacaccattctgaaatttttacggtctgtttggggttcgacaaaattgtcaaaaaaattcaggaaaataaagaaaaaaatccgtcaaagttctcgcacgcttttcagagaacttcctgattttctgtagctcctatctttttgcttcttgtgctgagaaaaatatcaaaaaaatcatacaaaaaagaaaaacaaaatcacctgtgatttctactagtgcctttttggcatcactagtacaatatttacgttactgccattctgctatttccatccatccatcctttgcacctgtggccagcaatatagtttcgtgttttgcactataattcaactttgcattattgtttgatcgtgctaatccttgacttgagtgcagcctacccacaactccacatatttctacgacgagcaggtttctgtttctccacgcaatcgctcatccaatctttcaccggttccacctgttggttgcagttcaccactgtggcttggtaagaacggataagaacttgataacagcactagtgtgagcgccttgtgagcagtacacccctgtttttgtcgttggtttttctccttttggtgtttgcgctaactatggcaggagcacacgacatggtggatgcccagttgcaggaagtaaggggacaagttgatggacttgctgctgacattaggacgatgcatgaacggcttgattcaacgatcacttcgacgaccgagcgtttcaaccaacttgaccttgctcaaacggcgactcgcaccacactcgacaccatcctggcacgccttgatgcattgaccacaaagatggagcaggaatacggcggtgacactgagcaggacgatggagattgccgtggtcgtgcacgtcgtgtggttcgtcatccccctaatgacttattttctaagattaaatttaaaattccatcttttaatggtaaatatgatcctgctgcatatcttgattgggaattagaggtagaacagaaattttcatgccatgatattcctgctaatagccaagtgaaggctgccattagtgaatttactgattttgctttaatttggtggcgtgagtataaacaaaaacttcccattaacagtgtcattacttggacccaattaaaaactgccatgcgccacagatttgttccttcctattatgctcgtgatttgcttaacaaaatgcagcgttttcaacaaggttcacaatctgttgaggaatattaccaggagttgcaaaagggtatgcttcgttgtggtttggttgagtcagatgacgctgctatggcgcgttttcgtggtggtttgaacagggaaattcaggatatacttgattataaggattattttgatataaccacattgtttgaatatgcttgcaaagctgaacgtgaagtgcagggacgacgatcaaagacatatactaactcttttgcaggccggggtccaacacacagctcaactccttccagccctgcacctcctacgcctagcactacatcgcgcacagggccggccaagccagtggcgccccctgccaaaggcgccgcttcttccacaggacgtacacgggatattcagtgccatcgttgcagagggtttgggcacatgattcgggactgcccaaacaagcgtaccttgtttatacgtgacaatggtgagtactcttcagccagtgattctgaggaaactagtcatgctatgattgccactaaccatgcagaaaatgaggaagtccacgttgatcccatcgacgccgataggtatgagagtcttgttgtgcagcgtgttctcagcacacaggttgcccaggccgaaaaaaatcagcgacacactctattccataccaagggcgtcgtgcacgaacggtcgattcgcatcatcatcgatagtggcagctgcaacaatttggcaagtacagcgttggtagagaaattatccttgcccactcgcacacatccacatccgtatcacattcaatggcttaatgatggtggtaaaataaaggtaacacgttcggtacgtgtccccttttcgctgggttcttattctgattatgttgattgcgatgttattcctatggaagcatgctctttgttattgggtcgaccttggcaatatgatactgatagtttacatcatggtcgttcaaatcattattctttcatgtttaaaggccagaaaataattatacatccaatgacccctgaccaaattttgaaagatgatcttactagggctgctaaaactgcacaacaagtcaaatcgacatcagccgcacctattaaatctgaaatcaagttgcactctcctgttttacttgctacacgtgctgattttgatgatctccatgaagctcatatgccctgttatgcacttgtatgctcgcgaatgcttgttccgcttgatgatgcaccgtctttggatataccccctgttgttgttaaccttttgcaggagtatgctgatgtttatcctacggacttaccaccgggtcttcctcccctccgtggcattgagcatcagatcgatctcatccccggcacttctcttccgaaccgcgctccgtaccgtacaaatccagatgagacgaaggagatccagcgccaggtgcagacgctgcttgataagggttacattcgtgagtctcttagcccttgctcggttcccgttttactcgttccaaagaaagatgggtcatggcgtatgtgcgtagattgtcgtgctattaataacatcacagttcgttatcgatatcctattccacgccttgatgatatgctagatgagcttagtggtgccgttattttctctaaggttgatttgcgtagcggttaccatcagattagaatgaaactcggtgatgaatggaaaacggcttttaaaacgaaatttggtttatatgaatggttggttatgccatttggattgactaatgctcccagcacctttatgcgtttaatgaacgaagttctacgggccttcataggtttgtttgttgttgtttatttcgatgatatccttatttacagcaagtctatagaggagcatttagaacatttgcgtgctgtttttgacgctttgcgtgctgctcgcttgtttggtaacatggaaaagtgcacattttgcacgcaacgtgtctcgtttcttggttatgtggttactccgcagggcattgaggtggatagcagcaagattgctgccattcgggagtggcctacaccgacgacggtcacacaaattcggagctttcttggacttgccggtttctaccgcagatttgttcgtgattttagctccattgcagcgcctctacatgagcttacaaagaaagatgtgccgtttgcctggagtgattcgcaggaggtagcgttcagcactttgaaagataagttaacccaagctcccctcttgcaattgcctgattttaataaagttttcgagcttgaatgcgatgctagtggtattgggctgggtgctgttttgttacaagaaggaaaaccagttgcttattttagtgaaaaattaagcggtgctagtctgaaatattctacttatgataaggagctttacgctttagtgcgcactttgcatacatggcagcactatctttggcatcgtgagttcataatccattctgatcatgaggctttaaaacatattcgtacccaaacaaatctgaaccgtcgtcatgctaaatgggtagaattcattgagtcctttccttacattattaaacacaagaacgggaaggacaatgttattgctgatgctttgtctcgtcgctataccatgctgtcacagttagattttaaaatctttggtttggacactgtgaaggatcaatatgttgacgatgctgattttaaagatgctttcggccattgtattaatggaaaaccatggggcaaatttcacatacaggatgggttcctgtttcgcgctaacaagctgtgtgttccagctagctcggttcgtcttttgttgttacaggaagcgcatggaggcggtctcatggggcattttgccgtctacaagacacatgaggtgttggctgcccacttcttttggcctcggatgcgcgctgatgtggagcgccttgttgcacgctgcactacttgtcagaaagctaagtcacggttgaacaaccatggtttgtatatgcctttgcctgtcccttcttctccttggcttgatatctctatggactttgttttgggcttgcctagaactaagaaggggagggatagtatttttgtggttgttgatagattctctaaaatggctcactttataccttgtcataaaactgatgatgctagcattgttgctgaagtgttctttagagaaattattcgtttacatggtattccaaaaacaatagtctctgatcgcgatgctaagtttctaagccatttttggagatctctttggaataaattgggaactaaattgttgtttagcactacttgtcaccctcaaactgatggacaaactgaggtagtaaatagaactttatctaccatgcttagggctgttttagacaagaatttgcgacgttgggaggattgcttgcctcatgttgaatttgcttacaatcatgccacacattcttctacaaagatgtgccctttccagattgtttatggttacattcctagggcacctattgatttgatttcacttaatgctgcgaacgccccacatgtagatgcttctgcacatgttgaacaaatgattaccatacatgaacaaacgaaacagaacattgctgctactaatacaaaaaatcaggttgctggtagtaaaggaagaaaacatgttacttttgaacctggtgatatggtttggttgcatttgagaaaggatcgttttcctactttgcgccgttctaaattgatgcctcgtgctgctggtccttttaagatactaaccaagattaatgataatgcttataccctcgacctacctgcggagtttggtgtttccactagttttaatgttgcagatttgaaaccgtatgcgggagaagatgaggagttgccgtcgaggacgacttcagttcaagaaggggaggatgatgcggacatcaacaccaacacgagcacatctacaccagcagcaccttctccagcccaggcgccaccccttccacctgggccagtgactcgggcccgtgcaagagaattgaactacatcatgttgttaaagaacgaaggcccggaagaatagacgaccagcccaattgcggcccataatggacgacctagggttggccgcccctaggggctgcgccccctctctatttattcaggagctgcgcctcctttatttcctgagttttgttttacgttagccttagctactctcgaacacgcgctaatctgcgctgtcttcgtgtattcagaactccaccctcgagtaatagattagattgctcgcatcttattcttgttcgttcttcgattgcgcacaggaaacgatcttcgtgatcaggccgatctcgcatcagcaaggtcggtaaccacagggagttggttcagcgattgcattggcgcctcgggcttgctcgtcgtagtcggatcgcaagggtcatcttccgccaaatcggaattatctctactcgccgaaagatcgggcacctcagctttatcaacatgagtttggacctaaagtagtggattgggcatgttcgttgcgaaaaacgaagaaatggttccggtggcaaaaactcgtgctttgtatgcacccgacacccgttttcggaatgggtgacttgcgacaacgaaattgcgcgaaaccaccccaaacatgagttttggacctaaagtagtggattgggcatgttcgttgcgaaaaacgaagaaatggttccggtggcaaaaactcgtgctttgtatgcacccgacaaccgttttcggaatgggtgacgtgcgacaacgaaattgcgcgaaaccaccccaaacatgagttttggacctaaagtagtggattgggcatgttcgttgcgaaaaacgaagaaatggttccggtggcaaaaactcgtgctttgtatgcacctgacacccgttttcggattgggtgacgtgcgacaacgaaattgcgcgaaaccacctcaaacattagttttggacctaaagtagtggattgggcatgttcgttgcgaaaaacgaagaaatggttccggtggcaaaaactcgtgctttgtatgcacctgacacccgttttcggattgggtgacgtgcgacaacgaaattgcgcgaaaccacctcaaacatgagttttggacctaaagtagtggattgggcatgttcgttgcgaaaaacgaagaaatggttccggtggcaaaaactcgtgctttgtatgcaccccgacacccgttttcggaatgggtgacgtgcgacaacgaaattgcgcgaaaccaccccaaacatgagttttggacctaaagtagtggattgggcatgttcgttgcgaaaaacgaagaaatggttccggtggcaaaaactcgtgctttgtatgcacccgacacccgttttcggaatgggtgacgcgggacaacgaaaccgcgcgaaaccaacccaaacatgagttttggacctaaagtagtggattgggcatgttcgttgcgaaaaacgaagaaatggttccggtggcaaaaactcgtgctttgtatgcaccccgacacccgttttcggaataggtgacgtgcgacaacaaaattgcgcgaaaccaccccaaacatgatttttggacctaaagtagtggattgggcatgttcgttgcaaaaaacgaaaaaatgatttcggtggcaaaaactcgtgctttgtatgcacccgacacccgttttcgggaaagggtgacgtgcgacgacgaaattgcgcgaaaccaccccaaacatgagtttggacctaaagtaatggattgggcatgttccttgcgaaaaaagaagaaatggttcgggtggcaaaaactcgtgttttgtatgcacccgacacccgttttccggaatgggtgacgtgcgacaacgaaattgcgcgaaaccaccccaaacttgagttttggacctaaagtagtggattgggcatgttcgttgcgaaaaaagaagaaatgggttccggtggcaaaaactcgtgctttatatgcacccgacacccgtttttggaatgggtgacgtgcggcaacgaaattgcgcgaaaccaacccaaacatgagttttggacctaaagtagtggattgggcatgttcgttgcgaaaaacgaagaaatggttccggtggcaaaaacttgtgctttgtatgcaccccgacacccgttttcggaatgggtgacgtgcgacaacgaaattgcgcgaaaccaccccaaacatgagttttggacctaaagtagtggattgggcatgttcgttgcgaaaaacgaagaaatgattccggtggcaaaaactcatgctttgtatgcacccgacaaccgttttcggaaagggtgacgtgcgacgacgaaattgcgcgaaaccaccccaaacatgagtttggacctaaagtag

SEQ ID NO: 706 - DNA, 823 bp, Zea mays
  source (0)...(0): Zea mays BAC clone full insert sequence contig bacm2.pk116.g16.fis1
  misc_feature (1)...(823): n = A,T,C or G
cgcgatccgcagtnnnnnnnnnnnnnnnnnnnnnnnnnnnnnnnnnnnnnnnnnnnnnnnnnnnnnnnnnnnnnnnnnnnnnnnnnnnnnnnnnnnnnnncttcatcattctccccttcttgcatttgagtcgtcctcgactcaagctcaacttcctctcccaagtagggctttaaatctgcaatgttaaatgtggggctaaccccaaagtctgcatgcaggtctagcctatatgcattgtcgttaattttctctagcactttaaacggtccatcggctcgaggcaacaatttagattttcgtaattcaggaaacctttcctttctcaaatgcaaccaaactaaatctccaggttcaaaatttatttcctttctacctttatcactagcaaacttatatctagcattcatacgctctatgttttctttagtagtttcatgcagttttaacatcaattcagcacgcctagtagcatcaaaatttagtttttcagaagatggcaaaggcattaaatcaataggagcacgaggcaacaaaccatatacaatctgaaatgggcacatctttgtagtagaatgcaatgatcgattataagcaaattcaacatgaggcaaacagtcctcccacatcttaatattcttctttagaactgcccttaacatagtagacaaagttctattcacaacttcagtttgaccatcagtttgaggatgacatgtagtagaaaataaaagcttagtccccaattttgcccacaaagtcctccaaaaatgactaagaaatttagcatcacgatcagaaacgattgtgttgggcacaccat

SEQ ID NO: 707 - DNA, 772 bp, Zea mays
  source (0)...(0): Zea mays BAC clone full insert sequence contig bacm2.pk116.g16.fis2
  misc_feature (1)...(772): n = A,T,C or G
gtccgatgnnnnnnnnnnnnnnnnnnnnnnnnnnnnnnnnnnnnnnnnnnnnnnnnnnnnnnnnnnnnnnnnnactaagttcggattgtatgagtggttagtcatgccttttgggttaactaatgcacctagcactttcatgagattaatgaacgaggttttgcgtgccttcattggaaaatttgtggtagtatactttgatgacatattgatctacagcaaatctatggatgaacatgttgatcacatgcgtgttgtttttaatgctttacgagatgcacgtttatttggtaaccttgagaagtgcacattttgcaccgatcgagtttcgtttcttggttatgttgtgactccacagggaattgaggttgatcaagccaaggcagaagcgatacatggatggcctatgccaaagactatcacacaggtgcggagtttcctaggacttgctggcttctatcgccgttttgtgaaggactttagcaccattgctgcacctttgaatgagcttacgaagaagggagtgcattttagttggggcaaagtacaagagcacgctttcaacgtgctgaaagataagttgacacatgcacctctcctccaacttcctgattttaataagacttttgagcttgaatgtgatgctagtggaattggattgggtggtgttttgttacaagaaggcaaacctgttgcatattttagtgaaaaattgagtgggtctgttctaaattattctaattatgataaggaattatatgctcttgtgcga

SEQ ID NO: 708 - DNA, 829 bp, Zea mays
  source (0)...(0): Zea mays BAC clone full insert sequence contig bacm2.pk116.g16.fis3
  misc_feature (1)...(829): n = A,T,C or G
ccnnnnnnnnnnnnnnnnnnnnnnnnnnnnnnnnnnnnnnnnnnnnnnnnnnnnnnnnnnnnnnnnnnnggtccaaaactcatgtttgggggtggtttcacgcaatttcgttgccgcacgtcaccaattccgaaaacgagtgtcggggtgcatacaagcaggagtttttgccaccgaaaccatttattcgtttttcgcaacgaacatgcacaatccactactttaggtcaaaaactcatgtttggggtggtttcgcgcaatttcgttgccgcacgtcacccattccgaaaacgggtgtcggggtgcatacaagcacgagttttcgccatcggaaccatttcttcgttttgcgcaacgaacatgcccaatccactactttaagtccaaaactcatgtttggggtggttttgcgcaatttcgttgccgcacgtcacccattccgaaaacgggtgtcggggtgcatacaaagcacgattttttgccaccggaaccatttctccgttttgcgcaacaaaaatgccaaatcaacaactttaggtccaaaactaaggtttgggggggttccccaaactttgttcccccccctccaccagttccaaaaacgggggccggggtgcaaacaatgaagaatttttgcccccgaaaccatttatgcctttttcacaacaaaactgcccaatctgcgacttaaagtccaaaacccatgtttggggggctttaaggaaatttcattgccgaacttcaccatttccaaaaagggggtcagggggaaaaaaaaaaagaattttccccccccgaaacccgtttctacgtttttggcaaaaaaaag

SEQ ID NO: 709 - DNA, 966 bp, Zea mays
  source (0)...(0): Zea mays BAC clone full insert sequence contig bacm2.pk116.g16.fis4
caaattttaaaatcatgataatattcttttacagtcctagcaccctgcttcaaagtgtctaattcagaaagtaagtgatcaacatagtatgcaggaatgaatgcatctctaaaatgaaatttgaattcttcccaagactatggaactttgttgtgcctacaaatgtatttccattccatcaatgcgtgctcagttaacacattagaggcaatataaattttttgtttttgagatagatcatgctcattgaattcctcatctaccttgagctcccaatcaatgtatgcacgaggatcgaatttaccggcatatgaaggcaagtgttgaatgatgcctccaatataacgttcggttgggtcaaaaatgtccatatcacctgccatgtttagtaaagacaagaaacaataaaaaatatctttgattctataaactactaggaatcattgttgtaatttctcactctcaaactggttaaacaagttcttacaagttctcactacgcaaagcaggaggcgctggcaaacaacacgaacaacaacaacagtggctgctagcacaacctggtggtgttgtagaaaattttgtggatttataggtggctgctaaaacaatagttccaaggaatagctagtaccacgttagccacaacaagttgaataaacattccacaatggtgttgtgctggtcctagtccaaaccgtaatagagacgcgagccgttacacaaatagtatcaccaaaagctcagaacagcaatctgatttctgaaactataaaaagaaggcacacaaactgccttttgttttgttgcacttacaaattttatctaccaaaattcagaactggtttttctctctttttttgcatgtgtcttttttttgttttgctgattagtgcggctttttttatgcactcgccttttgctttctcttctttttggttgaattgcagcaagaggtctaaactg

SEQ ID NO: 710 - DNA, 857 bp, Zea mays
  source (0)...(0): Zea mays BAC clone full insert sequence contig bacm2.pk116.g16.fis5
tgtaggaaaaaaacgctcgataaactcaccgatcaacctggaaatctgataccaattgatgaagctgaggtgcccgatctttcggcgagtagagataattctgatttggcggaagatgacccttgcgatccgactacgacgagcaagcccgaggcgccaatgcaatcgctgaaccaactccctgtggttaccgaccttgctgatgcgagatcggcctgatcacgaagatcgtttcctgtgcgcaatcgaagaacgaacaagaacaagatgcgagcaatctaatctattactcgagggtggagttctgaatacacgaagacagcgcagatttgcgcgtgttcgagagtagctaaggctaacgtaaaacaaaactcaggaaataaaggaggcgcagctcctgaataaatagagagggggcgcagcccctaggggcggccaaccctaggtcgtccattatgggccgcaattgggctggtcgtctattcttccgggccttcgttctttaacaacatgatgtagttcaattctcttgcatgggcccgagtcactggcccaggtggaaggggtggcgcctgggctggagaaggtgctgctggtgtagatgtgctcgtgttggtgttgatgtccgcatcattcttggcacggtaagagcagcaacaacaggagccggtgtaactatcgctaaggcgtagcacccttgtggttgttgtagtcggatagcacaacgtcgacctccaccccaaatcgtagttatcaggagacggtgtacctgtcgctcaaggcgccacaccatcttggttgtggtagtcgggcagccaacgtcgttctccaacaagttttccacctccatcatctct

SEQ ID NO: 711 - DNA, 742 bp, Zea mays
  source (0)...(0): Zea mays BAC clone full insert sequence contig bacm2.pk116.g16.fis6
tgcatgacctacagctaaactcagcctgagatactgcacattagagattcgacttatatccgggcaaccacctctccaaatctatttaacagacagttacaagtaaatacccattaaaaaggtactgaaaatacctacaagttttgcttaaagagaattcgcaaatttgtgctctgcaactatcaaaacgcggtcgatttattggtgactataacgacgcctaaagttcagacacaacagtgcaacaacttcagagcaacctaactccaattatatgcaatgagaattagaaacccatactctttgaaaagatcatgaaattactaaaactttcataatccacaaagaccaaattataccgtcttcaatgtctactcttccgtacaaaattaaagactcactctgctagagacaccaacaaagatgttttaagaaacccatatctctcaaatgtttagaccaaacatggtgattaagcatcctatggaaagatgcagaaacatactacaaaacattctagataagtgaagcctgattcagcctccaactaatttaaaatgcctcccaaaaccaaacaacacattatcaacaataataaaaaaaacaatataaaatgaaacccaagtcattggcaggtgccatcaacactaggattttccactaccaaactaggatgcaactccacaaagtctttaaataacactctaccaaataggttagaacactaagcacaacaatcaat

SEQ ID NO: 712 - DNA, 1006 bp, Zea mays
  source (0)...(0): Zea mays BAC clone full insert sequence contig bacm2.pk116.g16.fis7
ctcccagttaagcattgacttcgtttaagataaagcggtccaaataatgattcaacaagcatgcatagagaaactgatcataaaaaaaaatcaaactaccatacaatgttggcaaataaaaaaaataaaatgggttgtcaatatcgtccacatgactagcctgcaacaactagaaattatgcatagcctttatggctattgaaacaaaccatagaaggaaaacatgcacgacataaaatccacttgaaaccaccctatttattgttgaaaaaaataaggttgcacataataagaaaacctatcaggtaaacatggttggacttatcaatctacgtcatcttacaaattcacttgagttctaccagtctcaagatttcatagacattacaatgttgcctttgctctatagagacaaaccaattttatactaagatcaagttagcaagtagccacactagccaaaaaagtgaggcgcaaagcattgcacccatggaaatattacattgataagttgggttgtaacccaacagtcaatcaaactcaacaacaccataaaactacattatatagtgttttcacactacaccaagtcggattagacccactatagacaagctcaataaacaatcggtcctacaagtactagaacccaagaatccttttggaaaaaaacatccacagtcaagcatatagaaatatatgatagtaatagctcagagatttgaaaacattgcatcaaaaaaacatcatgacaatatgtatataaaacaagtacagtagtagcttcacttgcataatatcttcaataacaaccacatcaagaaaccaatattaaatagaaataacatatcatatccagcattacgtcattaatgacgtaccccatcaaaccataaaggaatttggagtaaggaagttctagtcatctatacaataaagtactaatatgaaagatatacgaacccatacccttcctatatgtgcaagtgtgtcaaatttatcttca

SEQ ID NO: 713 - DNA, 815 bp, Zea mays
  source (0)...(0): Zea mays BAC clone full insert sequence contig bacm2.pk116.g16.fis8
aaccctaaaccctaaaccctaaaccctaaaccctaaaccctaaaccctaaaccctaaaccctaagggcgaattcgatctcgaattcgagccaatatgcgagaacacccgagaaaattcatcgatgatggttgagatgtgtataagagacagccctaaaccctaaaccctaaaccctaaaccctaaaccctaaaccctaaaccctaaaccctaaaccctaaaccctaaaccctaaaccctaaaccctaaaccctaaaccctaaaccctaaaccctaaaccctaaaccctaaaccctaaaccctaagggcgaattcgatatcaagctggccgctcgagctataactatgactctcttaaggtagccaaatgctgcagactagtaattacacataacacacaactttgatgcccacattatagtgattagcatgtcactatgtgtgcatccttttatttcatacattaattaagttggccaatccagaagatggacaagtctaggttgcggccggccgctacaggaacaggtggtggcggccctcggtgcgctcgtactgctccacgatggtgtagtcctcgttgtgggaggtgatgtccagcttggcgtccacgtagtagtagccgggcagctgcacgggcttcttggccatgtagatggacttgaactccaccaggtagtggccgccgtccttcacttcagggccttgtgggtctcgcccttcacacgccgtcgcgggggtacaggcgctcggtggaggcctcccagcccatggtcttcttctgcatcacggggcgtcgaggggagtcacgccgat

SEQ ID NO: 714 - DNA, 1872 bp, Zea mays
  source (0)...(0): Zea mays BAC clone full insert sequence contig bacm2.pk116.g16.fis9
ctttatctaccatgctaagggctgttttagacaagaatttgagacgttgggaggattgcttgcctcatgttgaatttgcttacaatcatgccacgcattcttctacaaagatgtgccctttccagattgtttatggttacattcctagggcacctattgatttgatttcacttaatgctgcgaacgccccacatgtagatgcttctgcacatgttgaacaaatgattaccatacatgaacaaacgaaacagaacattgctgctactaatgcaaaaaatcaggttgctggtagtaaaggaagaaaacatgttacttttgaacctggtgatatggtttggttgcatttgagaaaggatcgttttcctactttgcgccattctaaattgatgcctcgtgctgctggtccttttaaggtactaaccaagattaatgataatgcttatatccttgacctgcctgcggagtttggtgtttccactagttttaatgttgcagatttgaaaccgtatgcgggagaagatgaggagttgtgatgaagacatccacactactgatgcatctataccaatacaagtaccaatttctggtcccattactcgcgctcgtgctcgtcaactcaaccatcaggtgattacactcttgagttcatgtccatcatatttagaccatggagacacgtgcactcttgttttgcttaggaatcagggagaagaccgaaagggaaaaggatttgaacatgctggattcggactgcagaagaacaccaacttgtgacggtcacgacggtcagatgcgggctcggattggaatgttcaagcacaacatggaaagcttatcaagtctactttcatatggatccggaattatagtcatatctgttctgaggccgccgtaatcattgttttcttaccgagacatttcctgcttttctgcccatggtgccgcgtcaccctattttggcccaatgggtcgagtatcaagttaggtccattagggacgcatcctagggttgcagcacgaccccaatacccttgtggtcgtcctcccatgtttataaaccccctagccgccaccaagaacagcgggttttgcttagatcaagtttagctctcgctacttgcttgcaagcacgcgtgctagttcagccgcccgtcttcttgtctttggaaccccaccatattggagtttgatttttaaacctacatttagatctggtaattcagtacttgttctacttgttcttgctagttcttcgattgcttgcaggacgagtgccctagtggccagggtgtcacgctccacaggatcgtgacagccataggaggtggtgtatcggttgctaaggcgcagcgtctttggaaggctgtagtcgggccgtgaacgtcgtctcctcccccaatcgagttattccacaccctctcatcgaaagatcgggcaatcacccaacgggtgcacatcagttggtaatcagagcaaggtttatcggtgagagatttacttttcttcgctgttttcttatctcctatagtccagaaaaagccaaaaaatagtagattagttttaccgcaatcctataaaccattgagcatttactagtactacttagttagggcttgttgagtttttggttgcatcggttgtgtcgagttgctggtcttagtttattcctttagagttttgagttctaccacgttttggtcaccacgagatccaccatcaccaaaaacatctctggttcgtttttgccaccacggatacatatcatatccgatttggaagtttaaatacaatctggaaagcttatcttatcttctttccaacggatctgaccttatctcaaaattcgttctgagcgctccgcaatcatcgtag

SEQ ID NO: 715 - DNA, 1732 bp, Zea mays
  source (0)...(0): Zea mays BAC clone full insert sequence contig bacm2.pk116.g16.fis10
cgccactggcttggccggccctgtgcgcgatgtagtgctaggcgtaggaggtgcagggctggaaggagttgagctgtgtgttggaccccggcctgcaaaagagttagtatatgtctttgatcgtcgtccctgcacttcacgttcagctttgcaagcatattcaaacaatgtggttatatcaaaataatccttataatcaagtatatcctgaatttccctgttcaaaccaccacgaaaacgcgccatagcagcgtcatctgactcaaccaaaccacaacgaagcatacccttttgcaactcctggtaatattcctcaacagattgtgaaccttgttgaaaacgctgcattttgttaagcaaatcacgagcataataggaaggaacaaatctgtggcgcatggcagtttttaattgggtccaagtaatgacactgttaatgggaagtttttgtttatactcacgccaccaaattaaagcaaaatcagtaaattcactaatggcagccttcacttggctattagcaggaatatcatggcatgaaaatttctgttctacctctaattcccaatcaagatatgcagcaggatcatatttaccattaaaagatggaattttaaatttaatcttagaaaataagtcattagggggatgacgaaccacacgacgtgcacgaccacggcgatctccatcgtcctgctcagtgtcaccgccgtattcctgctccatctttgtggtcaatgcatcaaggcatgccaggatggtgtcgagtgtggtgcgagtcgccgtttgagcaaggtcaagttggttgaaacgctcggtcgtcgaagtgatcgttgaatcaagccgttcatgcatcgtcctaatgtcagcagcaagtccatcaacttgtccccttacttcctgcaactgggcatccaccatgtcgtgtgctcctgccatagttagcgcaaacaccaaaaggagaaaaaccaacgacaaaaacaggggtgtactgctcacaaggcgctcacactagtgctgttatcaagttcttatccgttcttaccaagccacagtggtgaactgcaatcaacaggtggaaccggtgaaagattggatgagcgattgcgtggagaaacagaaacctgctcgtcgtagaaatatgtggagttgtgggtaggctgcactcaagtcaaggattagcacgatcaaacaataatgcaaagttgaattatagtgcaaaacacgaaactatattgctggccacaggtgcaaaggatggatggatggaactagcagaatggcagtaccgtaaatattgtactagtgatgccaaaaaggcactagtagaaatcacaggtgattttgtttttcttttttgtatgatttttttgatatttttctcagcacaagaagcaacaagataggagctacacgaagtttcacctaaaacagatatcagatgtggtctatggaaaatcaggaagttctctgaaaagcgtgcgagaactttgacgaatttttttctttattttcctgaatttttttgacaattttgtcgaaccccaaacagaccgtaggtcagtttggccggcctcagaatggtgtcaactagctcctgtaaaaatttcagattttttggacacccgagcgaaaagttatgcccgatttacggaaggtacctcaagttatgttctagtgatgcgaccgggatgatacaaccgtatcctttctccttcgttatctttttttt

SEQ ID NO: 716 - DNA, 1994 bp, Zea mays
  source (0)...(0): Zea mays BAC clone full insert sequence contig bacm2.pk116.g16.fis11
atcagtctgagggtgacaagtagtgctaaacaacaatttagttcccaatttattccaaagagatctccaaaaatggcttagaaacttagcatcgcgatcagagactattgtttttggaataccatgtaaacgaataatttctctaaagaacaattcagcaacaatgctagcatcatcagttttatgacaaggtataaagtgagccattttagagaatctatcaacaaccacaaaaatactatccctccccttcttagttctaggcaagcccaaaacaaagtccatagagatatcaagccaaggagaagaagggacaggcaaaggcatatacaaaccatggttgttcaaccgtgacttagctttctgacaagtagtgcagcgtgcaacaaggcgctccacatcagcgcgcatccgaggccaaaagaagtgggcagccaacacctcatgtgtcttgtagacgccaaaatgccccatgagaccgcctccatgcgcttcctgtaacaacaaaagacgaaccgagctagctggaacacacagcttgttagcgcgaaacaggaacccatcctgtatgtgaaatttgccccatggtttcccattaatacaatggccgaaagcatctttaaaatcagcgtcgtcaacatattgatccttcacagtgtccaaaccaaagattttaaaatctaactgtgacagcatggtatagcgacgagacaaagcatcagcaataacattgtccttcccgttcttgtgtttaataatgtaaggaaaggactcaatgaattcgacccatttagcatgacgacggttcagatttgtttgggtacgaatatgttttaaagcctcatgatcagaatgaattatgaactcacgatgccaaagatagtgctgccatgtatgcaaagtgcgcactaaagtgtaaagctccttatcataagtagaatatttcagactagcaccgcttaatttttcacgaaaataagcaactggttttccttcttataacaaaacaacacctagcccaataccgctagcatcgcattcaagctcaaaaactttattaaaatcaggcaattgcaagaggggagcttgggttaacttatctttcaaagtgctgaacgctaactcctgcgaatcactccaagcaaacggcacatctttctttgtaagctcatgtagaggcgctgcaatggagctaaaatcacgaacaaatctgcggtagaaaccggcaagtccaagaaagctccgaatttgtgtgaccgtcgtcggtgtaggccactccccaatggcagcaatcttgctgctatccacctcaatgccctgcggagtaaccacataaccaagaaacgagacacgttgcgtgcaaaatgtgcacttttccatgttaccaaacaagcgagcagcacgcaaagcatcaaaaacagcacgcaaatgttctaaatgctcctctatatacttgctgtaaataaggatatcatcgaaataaacaacaacaaacaaacctatgaaggcccgtagaacttcgttcattaaacgcataaaggtgctgggagcattagtcaatccaaatggcataaccaaccattcatataaaccaaatttcgttttaaaagccgtttccattcatcaccgagtttcattctaatctgatggtaaccgctacgcaaatcaaccttagagaaaataacggcaccactaagctcatctaacatatcatcaaggcatggaataggatatcgataacgaactgtgatgttattaatagcacgacaatctacgcacatacgccatgacccatctttctttggaacgagtaaaacaggaaccgagcaagggctaagagactcacgaatgtaacccttatcaagcagcgtctgcacctggcgctggatctccttcgtctcctctggatttgtacggtacgggggcgcggttcggaagagaagcgccggggatgagatcgatctgatgctcaatgccacggaggggaggaagac

SEQ ID NO: 717 - DNA, 2203 bp, Zea mays
  source (0)...(0): Zea mays BAC clone full insert sequence contig bacm2.pk116.g16.fis12
tcgctgaatttcttttgtttcctctggatttgtcctatatggcgcacgattcggcaaagatgcaccaggaataagatcaatttggtgctcaatccctcgtataggtggcagcccctctggtatctcacttggaaatacatcagaatactcctgcaaaatgttagtaataacaggaggcaaagaatgctgcatatcttgaattgaaatcaaagcatccttgcataccaaggcgtaggcaacagtagtgcaagcaaataattcattaacatcagtttttgttgcaagcaagcaatgtcctttcaattttatcccatctttgttattaccaacagctttaatattcttgttgttctcagttttagctttggtagctttagcaacatcatcacgcacaatagcctcaggggacatgggaagcaaaataattttcttatcatggtgtatgagagaatattgatttgatctaccatgatgcatacaatctgaatcaaattgccatggtctacctagcagaatattacaagcatccataggcacaacatcacagtcaacaacatcacgatatgaaccaatagcaaaattaattcgtaccagcttggttaccttgaccttaccactattgttgagccattgaatgtgatatggatgcgggtgcggtttggtcgtaagtgcaagcttctccaccatgtcgctgctagccaagttgttgcagctacctccatcaatgatcaaacgacatgaacgctccttaatgacacactttgtttgaaacaacgtatgtcgctgattctgctctgccttctccatttgtgcactaagcacacgctgtacaatgaggctctcataatgctctgcatcatctgcaccaatctgttcttcgggtggttccttagggcctgcatcatcagccgcaagcaaagcaagtgtagcttcatccaaatcactagcagaggaatacccaccatcgtcttttaccaccaaaacacgctgattaggacaatcacgctgcacgtgtccatagcccttgcatcgataacacagaacacctcttgttctacctgtggaagctactgaagaggcactacctgcgggtttctgggcagatttggttgctgaatttgtggaagatgcacgtggtttgtcgctggaggaaggcgggggtgctggtcgacttggcgagggagttggtgctggtgtacggccggtcatggacgtagtcgtgcgctgttgccatggtgtagattttcctgcagaaacattagaccttgcactagcacgtcgtccctgcacttccctttcagctttgcaagcaagatgaaacaatcgggttacattagcataatctttataagcaaggatgtcctgaatttccctatttaacccgcccaaaaatctagccatagcagattcctcaccctcctctatgttacaacgcagcatacccatttgtaattcctgataatattcttctacacttttagtaccctgtctcaattgttgcaacttgtttaacatatcacgtgcataataagaaggaacaaatctagcccgcatgacccgtttcaacgaatcccaagtttgtggcatgttattaggattcttcttaccatgttctatccaccaaacagaagcaaattcagtaaactcactagtagcagctctaacccgcgcattctcaggaaattcatggcatgcaaacttttgatcaaccgcaatctcccaagtaatgtaagcatcagggtcatatttaccatcaaaaggaggtattttaaatttaaccttactaaaagcatcatcattaccatgtacctcacgtcggcgaaaaccacccatacctctacggttagtacgtagtcgccggcgattaggtgcttcttggtcatcttgttcagtatcagcaacatagtcatcccagttaccttcggcgccctcatcacgcccaccattgatattagcatgcatctcatcaaaccgcctcaagagtgcgacaaggctcttgtcaatatgagcaactgtcatttccacatttgcaagtttggtgtttgtgtcgatctgtgtggcctccaattgccccatcttttcattcgtcacctgcatgtcattatcaagaccttccgtgtgcgtcttcaccagccttacaaagtattgtatgatacccttggtgcgaggagagtgtggcatattacgagaagcatcatcaacc

SEQ ID NO: 718 - DNA, 2773 bp, Zea mays
  source (0)...(0): Zea mays BAC clone full insert sequence contig bacm2.pk116.g16.fis13
ggaaacaactagtgaatgaacatgttacatctgatattgaaccaaacattttggctaaaaaggaacatgtcatttgtattgcaaacgaaactgaagaaataaatttgctctcttctttaaatacttggggctatattgagtttgatgatctttgtgagctcggtaatttggacaatattttatttgataggtcaactatgtcttgtccttctcatgctaaattttactttgctagtaagtacaacaatacagaacaatttttagtgcatagagtttatatttcatcaatatatagtgtttcttcacattgcacatgttctcaagaagtggagaaattattgtttccatgtactttagtaaaagattcaggtttatttttagaagatcatgataaaaccttagtcatgaacatcaatcatgatgcaacacaaaggacagtttgctgtcaagaagaggagaatgatgagaacataacctgctcagatatgaccaagtcaatggctcctgctgcaaaggtgaaactcttccacattataactaccatcgatatatttgaagaattgatattgcgccgtaaagtgtgtatacttttatttgtagaacttcttacatggatcaagcgatgtgttaagggttcaaggaaggctttgaggaacaaagaagttgattggggaccaagtaatgatatttacaacatcccctaatcatgcaatcacatcataagattgaccagatacttgggtgaggagtacacgctagagtcgaggacgactctattgtaagaaggggaggatgataaggacatcgctgccattgatacaaccacaccaattatcacttcaccattcgtagctaatcagggaccaatgacacgagcttgtgcacgtaaacttaattataaggtgaactcgtttctggctgctgaagctaattcttctttaaatgtggtactaaagtcttgctacgactttattatgctcaggtgtttggtaggtgaaccatcttggagtggagaaaacaacaaagcaataaaagttgttgcacccgagataatttcgtaactgcatcaagtgcatgttaaagagggcatatctttcaactcccaatgttgtttaaagcaaataagcacttgatggaaagcactctttgtctacttcttggtggagaaagaatcaattagagataccaaatgaggcgtccagaaactgtcgagagaacgtcttgactccaccagtccgagggaattcgtaactgcagcaagcaccatattaaatggagcatatctttcatctcctaaggttgtttagtgcaaataagtacttgttggaaagctctcttcgtctactttctggcggctgaagaatcaataggagaaaccaaacgacacgtccagaaactgtcgagagagcttcgttctccaccagaacttctttctattcctctatttaagcaactagcagccaccaaagaacttgggtttttgtttgatgtaagtttagcctttgctacttccttgtaaacgcgtgtgtcggctagaccacccggatacttgaaacagaaccccaactctatcagatccgtgagcgtctgctttttatcttgttcttgcttgttctcgattgcttgcaggttcaaggttgttcttggcacggtaagagcagcaacaacaggagccggtgtaactatcgctaaggcgtagcacccttgtggttgttgtagtcggatagcacaacgtcgacctccaccccaaatcgtagttatcaggagacggtgtacttgtcgctcaaggcgccacaccatcttggttgtggtagtcgggcagccaacgtcgttctccaacaagttttccacctccatcatctctcatcgaaagatcgggcacccttctacccgttgggtttatcacttccacaggacgtacacgggatattcagtgccatcgttgcagagggtttggacatatgattcgggactgcccaaacaagcgtaccttgcttatacgtgacaatggtgagtactcttcagccagtgattctgaggaaactagtcatactatgattgccactaaccatgcagaaaatgaggaagtccacgttgatcccatcgacgccgataggtatgagagtcttgttgtgcagcgtgttctcagcacacaggttgcccaggccgaaaaaaatcagcgacacactctattccataccaagggcgtcgtgcacgaacggtcgattcgcatcatcatcgatagtggcagctgcaacaatttggcaagtacagcgttggtatagaaattatccttgcccactcacacacatccacatccgtatcacattcaatggcttaatgatggtggtaaaataaaggtaacacgttcggtacgtgtccccttttcgctggattcttattctgattatgctgattgcgatgttattcctatggaagcatgctctttgttattgggtcgaccttggcaatatgatactgatagtttacatcatggtcgttcaaatcattattctttcatgtttaaaggccagaaaataattatacatccaatgacccctgaccaaattttgaaagatgatcttactagggctgctaaaactgcacaacaagtcaaatcgacatcagccgcacctattaaatctgaaatcaagttgcactctcctgttttacttgctacacgtgctgattttgatgatctccatgaagctcatatgccctgttatgcacttgtatgctcgcgcatgcttgttccgcttgatgatgcagcgtc

SEQ ID NO: 719 - DNA, 3188 bp, Zea mays
  source (0)...(0): Zea mays BAC clone full insert sequence contig bacm2.pk116.g16.fis14
ttcgctcttccctttgggtttctgtttgtgtttgaagaccctattctgatcctatttccattttgttcaaagtgaattcttacccccgtgatggtgttttataaggtcccaggttgttggtgaaggtttcctattataacactatgcaaaattcgttcaggttgctttggttggcacagatattcatacccattccccctgctaccacatcgtacttgttaccagacccaatgttttcaacttttctcattttttcttgctgtcacttggacgatgctgacatcatgaagtaaggggacaagttgatggacttgctgcggacattaggacgatgcatgaacggcttgattcaacgatcacttcgacgaccgagcgtttcaaccaacttgaccttgctcaaacggcgactcgcaccacactcgacaccatcctggcacgccttgatgcactgaccacaaagatggagcaggaatacggtggtgacaatgagcaggacgatggagatcgccgtggtcgtgcacgtcgtgtggttcgtcatccccctaatgacttattttctaagattaaatttaaaattccatcttttaatggtaaatatgatcctgctgcatatcttgattgggaattagaggtagaacagaaattttcatgccatgatattcctgctaatagccaagtgaaggctgccattagtgaatttactgattttgctttaatttggtggcgtgagtataaacaaaaacttcccattaacagtgtcattacttggacccaattaaaaactgccatgcgccacagatttgttccttcctattatgctcgtgatttgcttaacaaaatgcagcgttttcaacaaggttcacagtctgttgaggattattaccaggagttacaaaagggtatgcttcgttgtggtttagttgagtcggatgacgctgctatggcgcgttttcgtggtggtttgaacagggaaattcaggatatacttgattataaggattattttgatataaccacattgtttgaatatgcttgcaaagctgaacgtgaagtgcagggacgacgatcaaagacatatactaactctcttgcaggccggggtccaacacacagctcaactccttccagccctgcaccttctacgcctagcactacatcgcgcacagggacgaccaagccagtggcgccccctgccaaaggcgccgcttcttccacaggacctacacgggatattcagtgccatcgttgtagagggtttgggcatatgattcgggactgcccaaacaagcgtaccttgcttatacgtgacaatggtgagtactcttcagccagtgattctgaggaaactagtcatgctatgattgccactaaccatgcagaaaatgaggaagtccacgttgatcctatcgacgccgataggtatgagagtcttgttgtgcagcgtgttctcagcacacaggttgcccaggccgaaaaaaatcagcgacacactctattccataccaagggcgtcgtgcacgaacggtcgattcgcatcatcatctatagtggcagctgcaacaatttggcaagtacagcgttggtagagaaattatccttgcccactcgcacacatccacatccgtatcacattcaatggcttaatgatggtggtaaaataaaggtaacacgttcggtacgtgtccccttttcactgggttcttattctgattatgctgattgcgatgttattcctatggaagcatgctctttgttattaggtcgaccttggcaatatgatactgatagtttacatcatggtcgttcaaatcattattctttcatgtttaaaggccagaaaataattatacatccaatgacccctgaccaaattttgaaagatgatcttactagggctgctaaaactgcacaacaagtcaaatcgacatcagccgcacctattaaatctgaaatcaagttgcactctcctgttttacttgctacacgtgctgattttgatgatctccatgaagctcatatgccctgttatgcacttgtatgctcgcgaatgcttgttccgcttgatgatgcaccgtctttggatataacccctgttgttgttaaccttttgcaggagtatgctgatgtttatcctacggacttaccaccgggtcttcctcccctccgtggcattgagcatcagatcgatctcatccccggcgcttctcttccgaaccgcgccccgtaccgtacaaatccagatgagacgaaggagatccagcgccaggtgcagacactgcttgataagggttacattcgtgagtctcttagcccttgctcggttcctgttttactcgtcccaaagaaagatgggtcatggcgtatgtgcgtagattgtcgtgctattaataacatcacagttcgttatcgatatcctattccacgccttgatgatatgctagatgagcttagtggtgccgttattttctctaaggttgatttgcgtagcggttaccatcagattagaatgaaactcggtgatgaatggaaaacggcttttaaaacgaaatttggtttatatgaatggttggttatgccatttggattgactaatgctcccagcacctttatgcgtttaatgaacgaagttctacgggccttcataggtttgtttgttgttgtttatttcgatgatatccttatttacagcaagtctatagaggagcatttagaacatttgcgtgctgtttttgacgctttgcgtgctgctcgcttgtttggtaacatggaaaagtgcacattttgcacgcaacgtgtctcgtttcttggttatgtggttactccgcagggcattgaggtggatagcagcaagattgctgccattcgggagtggcctacaccgacgacggtcacacaaattcggagctttcttggacttgccggtttctaccgcagatttgttcgtgattttagctccattgcagcgcctctacatgagcttacaaagaaagatgtgccgtttgcttggagtgattcgcaggaggtagcgttcagcactttgaaagataagttaacccaagctcccctattgcaattgcctgattttaataaagtgtttgagcttgaatgcgatgctagcggtattgggctaggtgctgttttgttacaagaaggaaaaccagttgcttattttagtgaaaaattaagcg

SEQ ID NO: 720 - DNA, 4544 bp, Zea mays
  source (0)...(0): Zea mays BAC clone full insert sequence contig bacm2.pk116.g16.fis15
tcagttcttataaattataaagaagtggagtactttccttaagatttccaacaaatattggatcaccctttttggtgacctataagttaagctacaactgttttaagtggaatctttgaatctgtccaaatgtggacagcaaagcctttcttatgtcttttgaccttgatatgcattgaattaacctgatatgtttataaatgaaatatagacaagtttactggctttcaaaaaagtctaggagcgcctaaattggatgactgagactccaattatggattttttttaagtgagtagttgaattctgtccaagtctggacaaaatttacgtttcgcattgtttgtcctttctaagtgtcaaatctcgtggtgatgataataccaagggtatagtggactttgtaagctttccataaagtcctagtttactactgttggatgcatattttgtgagtttatgagcaaaacaattaaccgttgtgctgatgtctagaaatatgcaagcattaaattgatcttttgaagttactcttgtttggataggtttggtttaggctattggagcacagtatgtattgctttcattatatatattcattgaagtacttgcatgtgtcaatgttgatttggtgtcaggaaaactttgtccgggttatataggactgtctattatcttagcccgagttggcagcttggcttagcacatgcaattgtcggagtctatgatcagagtacgccatgtattccatgtctctatgttgagaaagtatttgcggaatccatatccataatcgagctagagtcgattcccatgtagcaagacctgactctagagtgtcgtctgctgcgtatcctagaatccttgaagctcgaggagctgatgcggcagaagtaccccgaacttttcgttatggggtgagtttttgttgtcgctgatctttccttgtcgttccgataggagcgtcggaattcgaggtcgaattctttttaaggggggtagagtgtgatacccggtttgcaaagaagagaagttgaaggttattctttttgtttgttttttctcttattcgggtgtcgcgctttggggatttagaatttgtggaaaacattcaccagtatagcagtagagtggttggtcgggagctgtcgtgcaagcgagttgggccgcgaatcgcaattcggcccactaaccctcccctaaccctagccgcccccccctttttcccccttgtgttgttgcagccgccgcttcccctcccctttctcttggacgccccccccctctcccatcttcttcctcctcaaacatttgcagccctcaccacccaaaaccctagctgcccccccatttcttcccctcctcccaaggtgcagccctcccgtgtggttctccgtcgtgtggctgcgatctcaattggagtttggagggaggaagaaggaaggagtaagggaagaacctaaggtgaatttgtgattaacttttgttgtttttgtgctgcaatcaattggattatgtgtttatctttgcgaatcggtagaggtgctgtccaggaattttgtgagtgggtgaacagcagtagttctagggatttctgggaattttcgtagggtaattagtgggaatcagtgggataatcatgtagagctttgtcatacctttccaacgagtacttatgcgctcgattcggagttataatttaggagatatcgtcgtttgaatccgggtatgttgctgtccaaaaaaacagatttttcaggtgggtgaacagcagtagtattagcagtttctgggaattttcgtggggtaattagtgggaatcagtgggataatcatgtagagctttgtcatacctttccaacgagtacttatgcgctcgattcggagttataatttaggagatatcgtcgtttgaatccgggtatgttgctgtccaaaaaaacagatttttcaggtgggtgaacagcagtagtattagcagtttctgggaattttcgtggggtaattagtgggaatccgtgggataatcatgtagagctttgtcatacctttccaacgagtacttatgcgctcgattcggagttataatttaggagatatcgtcgtttgaatccgggtatgttgctgtccaaaaaaacagatttttcaggtgggtgaacagcagtagtattagcagtttctgggaatttttcgtggttaattagtgctaaccagtatgataatcatgtatggctttgtcttatctttccaatgagtacttatgcgcttgaattggaattatattttaaaagatatcgctgtttgaatccgggtatgtcgctgtccaaaagagaaaaaaacagattacagggttcaacttgtgaactgttttgggctaattagatgttggaatttaattataaattgtatacaaaacttgtggggaattttatgtagatgcctctggagtttttgtttgttaccaatgctgtcataattttgaagttatgaaattattaagcagcgccgctacagtttggtgggtgtggggagagatgtaacccgtggcggggtttgagtttgtgcgtaggtgcggcgtcgtttatgagcctggttatgtgaaattggtgcactaagttgtgtgtcaaaaacaggtggtggacttccggatcgtacttagggatttgcccgaacttccggtaaaggcaagtaaatatagtggtggttgctaccgtttggtttgcatcctattccctgtcattgagtatgcataagtttttaattatgttaatcattgaattctatgatgaagtttatttgtttggaagtattaattctcaattgtctaatattgtggatgatcataatttggttatgatatatgtggttgattcccatcttggatgaagttgaagtgtctttttgaatcacgttatatgaagtgttgtaggcatgacatgcacatcgcatcatccatcttgcattttgaagttatgtcgtgatcttatggtccgaccgtaccggtacatttttagcatcgtatgttgcccgaggaggggtacgatgcggcttcatatccttagaggtatgaaggcagaagtcatccttgcatttgcagacatttgcattcatgaggaatatatgaagtgtgacattactatgttactattgtggtttctacctgcgaggtgtggtaactaggtgtgttgtacgttgtatacgtgctgcatcttggtaataagaaggtggtggaatcaggtggtggtaaaacaatgttcttatgtggttgaatagtttgataatattttacttgctgagatatgtcatctcactcttgcattactcaatgcaggtacttgatacatgttgggaatgaggggagtagcagcacgtccacttacactctcacaataacgctgcccaggcgcagccatgatttaattagaaacttattgtcaaaggaagtttgttttttatatagacgtgcacactgattaattcagttcaggtcgtacgtttatcttcccttgctagccgattaataatacttagtatgtttttggtcatgatatatgtttataacctgttgcccccttatttatgcaatcttgcaaaggggatgctgccgaaattttatatatggacgtcagaagtgtagttcagtagcattctgggttgtttgtggaacctggggtgttacacaacgaacatgcccaatccactactttaggtccaaaactcatgtttggggtggtttcgcgcaatttcgttgccgcacgtcacccattccgaaatagggtgttggggtgcatacaaagcacgagttttcgccaccggaaccatttcttcgtttttcacaatgaacatgcccaatccactactttaggtccaaaactcatgtttggggtggtttcgcgcaatttcgttgccgcacgtcacccattccgaaaacgggtgtcgggtgcatacaaagcacgagttttcgccaccggaaccatttcttcgtttttcgcaacgaacatgcccaatccactactttaggtccaaaactcatgtttggggtggtttcgcgctatatcgttggcgcacgtcacccattccgaaaacgggtgtcggggtgcatacaaagcacgagtttttgccaccggaaccatttcgtcgttttttgcaacgaacatgcccaatccacaactttaggtccaaaactcatgtttgggtggtttctcgcaatttcgttgccgcacgtcacccattctgaaaacgggtttcggggtgcatacaaagcacgagttttcgccaccggaaccatttctttgtttttcgcgatgaacatgcccaatcccctactttaggtccaaaactcatgtttgtggtggtttcgcgcattttcgttgccgcacgtcacccattccgaaaacgggtgtcggggtgcatacaaagcatgagttttcgccaccggaatcatttcttcatttttcacaacgaacatgcccaatccactactttaggtccaaaactcatgtttggggtggtttcgcgcaatttcgttgccacacgtcacccattc

SEQ ID NO: 721 - DNA, 3712 bp, Zea mays
  source (0)...(0): Zea mays BAC clone full insert sequence contig bacm2.pk116.g16.fis16
gagttcatgtccatcatatttagaccatggagacccgtgcactcttgttttgcttaggaatcagggagaagaccgaaagggaaaaggatttgaacatgctggattcggactgcagaagaacaccaacttgtgacggtcacgacagtcagatgcgggctcggattggaatgttcaagcacaacatggaaagcttatcaagtctactttcatatggatccggaattatagtcatatctgttctgaggccgccgtaatcattgttttcttaccgagacatttcctgcttttctgcccatggtgctgcgtcaccctattttggcccaatgggtcgagtatcaagttaggtccattagggacgcatcctagggttgcagcacgaccccaatacccttgtggtcgtcctcccatgttaataaaccccctagccgccaccaagaacagcgggttttgtttagatcaagtttagctctcgctacttgcttgcaagcgcgcgtgctagttcagccgcccgtcttcttgtcttcggaaccccaccatattggagtttgatttttaaacctacatttagatctggtaattcagtacttgttctacttgttcttgctagttcttcgattgcttgcaggacgagtgccctagtggccagggtgtcacgctccacaggatcgtgacagccataggaggtggtgtatcggttgctaaggcgcagcgtctttggaaggctgtagtcgggccgtgaacgtcgtctcctcccccaatcgagttattccacaccctctcatcgaaagatcgggcaatcacccaacgggtgcacatcaagttgccgtcgaggacgacttcagttcaagaaggggaggatgatgcggacatcaacaccaacacgagcacatctacaccagcagcaccttctctagcccaggcgccaccccttccacctgggccagtgactcgggcccgtgcaagagaattgaactacatcatgttgttaaagaacgaaggcccggaagaatagacgaccagcccaattgcggcccataatggacgacctagggttggccgcccctaggggctgcgccccccctctatttattcaggagctgcgcctcctttattttccgagttttgttttacgttagccttagctactctcgaacacgcgcaaatctgcgctgtcttcgtgtattcagaactccaccctcgagtaatagattagattgctcgcctctttttcttgttcgttcttcgattgcgcacaggaaacgatcttcgtgatcaggccgatctcgcatcagcaaggtcggtaaccatagggagttggttcagcgattacattggcgcctcaggcttgctcgtcgtagtcggatcgcaagggtcatcttccaccaaatcggaattatctctactcgccaaaagatcgggcacctcagctacatcactaggggatccacatttgatttaattggttattcggatgtcgattgggcggggtgtaagattaatagaaagagcacatcagggacttgccagtttttgggaagatccttggtgtcttgggcttcaaagaagcaaaattccgtagctctttctaccgctgaggccgagtacattgccgcaggccattgttgcgcgcaactactttggatgaggcaaacccttagggactacggttacaaattaaccaaagttcctcttctatgtgataatgagagtgcaatccgcatggcggataatcccgttgagcatagccgcactaaacacatagccattcggtatcattttctaagggatcaccaacaaaagggagatatcgagattgcatatattaacactaaagatcaattagccgatatctttaccaagccacttgatgaacaaacttttaacaaacttaggcatgagctaaatattcttgattctaggaacttcttttgttgatttgcacacatagctcattcatatacctttgatcatgtctctttcatgtgctatgactaatatgttttcaagtaaatttcaaaccaagtcataggtatattgaaagggaattggagtcttcggcgaagacaaaggcttccactccgtaacccatccttcgccgtcgctccgagcaactctccggctttggtataatcttcactcatatgttttatttgccgaaagggagaaaagtagttcaaagggctctaatgattccgtttttggcgatttatgcgaaagggggagagaacatgagcccaaagcaaaaggaccgcaccaccacctaattttaaaagaatttctcaattggtataattttcaaattagtatctcattgtgttcaaaaaaaggggagaggagtagtattttcaaaatcaatatcttaaaaccctcttgaacactaagaggaggatttcatttagggggagttttgtttagtcaaaggaaaagcaattgaaacaaggggagaaaatttcaaatcttgaaaatgcttatcaaaactcttattcatttacttttgactatttgcaaaaggactttgaaaagaatttacaaaagaatttgcaaaaacaaaacatgtggtgcaagcgtggtccaaaatgttaaaaataaaagaaacaatccatgcatatcttatgagtagttatattggctcaattccaagcaacctttgcacttacattatgcaaactagttcaaatatgcacttctatacttgctttggtttgtgttggcgtcaatcaccaaaaagggggagattgaaagggaattaggcttacacctatcttcctaattgattttggtggttgaattgcccaacacaaataattggactaactagtttgctctagtctataagttatacaggtgccaaaggttcacacttagccaataaaaagaccaagaaatgggttcaacaaaaagagcaaggaataaccgaaggcagccctggtctggcgcaccggactgtccggtgtgccaccggacagtgtccggtgcaccaccggactgtgtccggtgcaccagggaactcgacgcccaacttcacaccttcgggaattttcagagacgcttcgctataattcaccggacttgtccggtgcacaccggacagtgtctggtgctccagaggagagcgactctaaactcgccagcttcggatttcagctccgatataattcaccggacatgtccggtgcacaccggactgtccggtgagccagcggagcaatggctacttcgtaccaacggtcacctgcagaagcaattaatgcgcgccagagcgcgcagaagtcaggcacgcgcgaagtggcgcaccggacactctacagtacatgtccggtgtgccaccggacatccaggcgggcccagcagtcagagctccaacggtcggaacccaacggcctggtgacgtggctggcgcaccggacactgtccggtgtgcaccggactgtccggtgcaccatgcgacagacagcctccaccaaacggctagtttggtggaggctgtctgtcgcatggtgcaccggacagtccggtgcacaccggacagtgtccggtgcgccagccacgtcaccaggccgttgggttccgaccgttggagctctgactgctgggcccgcctggatgtccggtggcacaccggacatgtactgtagagtgtccggtgcgccacttcgcgcgtgcctgacttctgcgcgctctggcgcgcattaattgcttctgcaggtgaccg

SEQ ID NO: 722 - DNA, 4980 bp, Zea mays
  source (0)...(0): Zea mays BAC clone full insert sequence contig bacm2.pk116.g16.fis17
atccactactttaggtccaaaactcatgtttggggtggttttgcgcatttcgttgccgcacgtcacccattccgaaaacgggtgtcggggtgcatacaaagcacgagttttcgccaccggaaccatttcttcattttgcgcaatgaacatgcccaatccactactttaggtccaaaactcatgtttgggggtggtttcacgcaatttcgttgccgcacgtcaccaattccgaaaacgagtgtcggggtgcatacaagcaggagtttttgccaccgaaaccatttattcgtttttcgcaacgaacatgcacaatccactactttaggtcaaaaactcatgtttggggtggtttcgcgcaatttcgttgccgcacgtcacccattccgaaaacgggtgtcggggtgcatacaagcacgagttttcgccatcggaaccatttcttcgttttgcgcaacgaacatgcccaatccactactttaggtccaaaactcatgtttggggtggttttgcgcaatttcgttgccgcacgtcacccattccgaaaacgggtgtcggggtgcatacaaagcacgagtttttgccaccggaaccatttcctcgttttgcgcaacgaacatgcccaatccactactttaggtccaaaactcatgtttggggtggtttcgcacaatttcgttgccgtacgtcaccaattccgaaaacgggtgtcggggtgcatacaagcaggagtttttgccaccggaaccatttattcgtttttcgcaacgaacatgcccaatccactactttaggtccaaaactcatgtttggggtggtttcgtgcaatttcgttgccgcacgtcaccaattccgaaaacaggtgtcggggtgcatacaagcactagttttcgccaccggaaccatttcttcgtttttcgcaacgaacatgcccaatccactactttaggtccaaaactcacgtttggggtggtttcgcgcaatttctttgcagcacatcacccattccgaaaacgggtgtcggggtgcatacaaagaacgagagttcgccaccggaaccatttcttcgttttgcgcaacgaacatgcccaatccactactttaggtccaaaactcatgtttggggtggtttcgcgcaatttggttgccgcacgtcaccaattccgaaaacgggtgtcggcgaggatacaagcacgagtttttgccactgaaaccatttattcgtttttcgcaacgaacatgcccaatccactactttaggtccaaaactcatgtttggggtggtttcgcgcaatttcgttgccgcacgtcaccaattccgaaaacgggtgtcggggtgcatacaagcacgagttttcgccaccggaaccatttcttcgtttttcgcaacgaacatgcccaatccactactttaggtccaaaactcatgtttggggtggtttcgcgcaatttcgttgtagcacgtcacccattccgaaaacgggtgtcggggtgcatacaaagcacgagagttcgccaccggaaccatttcttcgtttttcgcaacgaacatgcccaatccactactttaggtacaaactcatgtttggggtggtttcgtgcaatttcgttaccgcacgtcacccattccgaaaacgggtgtcgggtgcatacaaagcatgagttttcgccaccggaaccatttcttcgtttttcgcaacgaacatgccaaatccactactttatgtccaaaactcatgtttggggtggtttcgcgcaatttcgttgcaacatgtcacccattcccaaaacgggggtcagggtgcatataaagcacgagtttttgtcaccggaaccatttcgttgttttttgcaacgaacatgcccaatccactactttaggtccaaaactcatgtttggatggtttcgcgcaatttcgttgccgcacgtcacccattccgaaaatgggtgtcggggtgcatacaagcacgagttttcgccaccggaaccatttcttcgttttgcgcaacgaacatgcccaatccactactttaggtccaaaactcatgtttggggtggttttgcgcaatttcgttgccgcacgtcacccattccgaaaacgggtgtcggggtgcatacaaagcacgagttttcgccgccggaaccatttcttcgtttatcgtaatgaacatgcccaaaccctactttaggtccaaaactcatgtttggggtggtttcgcgcaatttcgttgccgcacgtcacccattccgaaaacgggtgtcgtggtgcatacaaagcatgagttttcgccaccggaaccatttcttcgtttttcacaacgaacatgcccaatccactactttaggtccaaaactcatgtttggggtggtttcgcgtaatttcgttgccgcacgtcacccattccgaaaatgggtgtcggggtgcatacaagcacgagttttcgccatcggaaccatttcttcgttttgcgcaacgaacatgcccaatacactactttaggttcaaaactcatgtttggggtggttttgcgcaatttcgttgccgcatgtcacccattccgaaaacgggtgtcggggtgcatacaaagcacaggttttcgccaccggaaccatttcttcgttttgcgcaatgaacatgcccaatccactactttaggtccaaaactcatttttgggggtggtttcacgcaatttcgttgccgcacgtcaccaattccgaaaacgggtgttggggtgcatacaagcacgagtttttgccaccggaaccatttattcgtttttcgcaacgaacatgcccaatccactactttaggtccaaaactcatgtttggggtggtttcgcgcaatttcgttgccgcacgtcacccattccgaaaacgggtgtcggggtgcatacaagcacgagttttcgccaccggaaccatttcttcatttttcacaacgaacttgcccaatccactactttagggccaaaactcatgtttggggtggtttcgtgcaatttcgttgcagcacgtcacccgttccgaaaacgggtgtcggggtgcatacaaagcacgagagttcgccaccggaaccatttcttcgtttttcgcaacgaacatgcccaatccactactttaggtccaaaactcatgtttggggtggtttcgcgcaatttcgttaccgcacgtcacccattccgaaaacgggtatcgggtgcatacaaagcatgagttttcgccaccggaaccatttcttcgtttttcacaacgaacatgcccaatccattactttaggtccaaaactcatgtttggggtggtttcgcgcaattttgttgtcgtacgtaacccattcccaaaacgggggtcggggtgcatacaaagcacgagtttttgacaccggaaccaattcttcgtttttcgcaacgaacatgcccaatccactactttaggtccaaaactcatgtttggggtggtttcacgcaatttcgttgtcgcacgtcacccattccgaaaacaggtgtcccgcatacaaagcatgagttttcgccaccggaaccatttcttcgtttttcacaacgaacatgcccaatccactactttaggtccaaaactcatgtttggggtggtttcgcgcaatttcgttgccgcacatcacccattccgaaaatgggtgtcggggtgcttacaagcacgagttttcgccatcgaaaccatttcttagttttgcgcaacgaacatgcccaatccactactttaggtccaaaactcatgtttggggtggttttgcgcaatttcgttgccgcacgtcacccattccgaaaacgggtgtcggggtgcatacaaagcacgagttttcgccaccggaaccatttcttcgttttgcgcaatgaacatgaccaatccactactttaggtcaaaaactcatgtttggggtggtttcacgcaatttcgttgccgcacgtcaccaattccgaaaacgggtgtcggggtgcatgaaagtcgcctagaggggggggggtgaatagggcgaatctgaaatttacaaacttaatcacaactacaagtcgggttagcgttagaaatataaaacgagtccgagagagggcgcaatacaaatcgcaagcgaataaagcgtatgacacaaggatttgttttaccgaggttcggttctctcaaacctactccccgttgaggtggtcacaaagaccgggtctctttcaaccctttccctctctcaaacggtccctcggaccgagtgagcttttcttctcaatcacttggaacataaagttcccacaaggaccaccacgcgattggtgtctcttgcctcaattacaagtgagtttgatctcaagaaagaatgagaaagaaagcaatccaagcgcaagagctcaaaagaacacaacaaatctctctcacttaacactaaagcttttgtggaattgggaaaggatttgatcacttgggtgtgtctagaattgaatgctagagctcttgtaagtagttggaaggtggaaaacttggatgacttgaatgtggggtgcacatccaaccaacccactcccctattttgagtccaaatcccctgtttgcgggggaattccccaaattcttgattgatagtcaacccgtccaaaaacgggagtcggggtgctaacaaagcatgatataccgccttacaaaaataaaacccaatttgacccaaaaaaatgcccaccttctacatgaaggccaaaactcatgtttgcaaaagaacccgaagtaatttttcattccaagaaacacccaccccttttttgtccccagggttttttttaataacggccgtgtcggaacaacttacttttttcaaaagtcttctgcaacttaacccctacctttttttgtaaaacaaataaccctggctgagttattccttccttattttttataacaaaccaaaacattaataaaaaatggtaaaataaaggtaaacacgatcagataaataccccca

SEQ ID NO: 723 - DNA, 5476 bp, Zea mays
  source (0)...(0): Zea mays BAC clone full insert sequence contig bacm2.pk116.g16.fis18
gaacgccccacatgtagatgcttctgcacatgttgaacaaatgattaccatacatgaacaaacgaaacagaacattgctgctactaatacaaaaaatcaggttgctggtagtaaaggaagaaaacatgttacttttgaacctggtgatatggtttggttgcatttgagaaaggatcgttttcctactttgcgccgttctaaattgatgcctcgtgctgctggtccttttaagatactaaccaagattaatgataatgcttataccctcgacctacctgcggagtttggtgtttccactagttttaatgttgcagatttgaaaccgtatgtgggagaagatgaggagttgccgtcgaggacgacttcagttcaagaaggggaggatgatgcggacatcaacaccaacacgagcacatctacaccagcagcaccttctccagcccaggcgccaccccttccacctgggccagtgactcgggcccatgcaagagaattgaactacatcatgttgttaaagaacgaaggcccggaagaatagacgaccagcccaattgcggcccataatggacgacctagggttggccgcccctaggggctgcgccccctctctatttattcaggagctgcgcctcctttatttcctgagttttgttttacgttagccttagctactctcgaacacgcgcaaatctgcgctgtcttcgtgtattcagaactccaccctcgagtaatagattagattgctcgcatcttgttcttgttcgttcttcgattgcgcacaggaaacgatcttcgtgatcaggccgatctcgcatcagcaaggtcggtaaccacagggagttggttcagcgattgcattggcgcctcgggcttgctcgtcgtagtcggatcgcaagggtcatcttccgccaaatcagaattatctctactcgccgaaagatcgggcacctcagcttcatcaaagaacaaccttgaacctgcaagcaatcgagaacaagcaagaacaagataaaaagcagacgctcacggatctgatagagttggggttctgtttcaagtatccgggtggtctagccgacacacgcgtttacaaggaagtagcaaaggctaaacttacatcaaacaaaaacccaagttctttggtggctgctagttgcttaaatagaggaatagaaagaagttctggtggagaacgaagctctctcgacagtttctggacgtgtcgtttggtttctcctattgattcttcagccgccagaaagtagacgaagagagctttccaacaagtacttatttgcactaaacaaccttaggagatgaaagatatgctccatttaatatggtgcttgctgcagttacgaattccctcggactggtggagtcaagacgttctctcgacagtttctggacgcctcatttggtatctctaattgattctttctccaccaagaagtagacgaagagtgctttccatcaagtgcttatttgctttaaacaacattgggagttgaaagatatgccctctttaacatgcacttgatgcagttacgaaattatctcgggtgcaacaacttttattgctttgttgttttctccactccaagatggttcacctaccaaacacctgagcataataaagtcgtagcaagactttagtaccacatttaaagaagaattagcttcagcagccagaaacgagttcaccttataattaagtttacgtgcacaagctcgtgtcattggtccctgattagctacgaatggtgaagtgataattggtgtggttgtatcaatggcagcgatgtccttatcaggaagaagcggcacctttggcagggggcgccactggcttggtcgtccctgtgcgcgatgtagtgctaggcgtaggaggtgcagggctggaaggagttgagctgtgtgttggaccgcggcctgcaagagagttagtatatgtctttgatcgtcgtccctgcacttcacgttcagctttgcaagcatattcaaacaatgtggttatatcaaaataatccttataatcaagtatatcctgaatttccctgtttaaaccaccacgaaaacgcgccatagcagcgtcatccgactcaaccaaaccacaacgaagcatacccttttgtaactcctggtaatattcctcaacagactgtgaaccttgttgaaaacgctgcattttgttaagcaaatcacgagcataataggaaggaacaaatctgtggcgcatggcagtttttaattgggtccaagtaatgacactgttaatgggaagtttttgtttatactcacgccaccaaattaaagcaaaatcagtaaattcactaatggcagccttcacttggctattagcaggaatatcatggcatgaaaatttctgttctacctctaattcccaatcaagatatgcagcaggatcatatttaccattaaaagatggaattttaaatttaatcttagaaaataagtcattagggggatgacgaaccacacgacgtgcacgaccacggcgatctccatcatcctgctcagtgtcaccgccgtattcctgctccatctttgtggtcaaggcatcaaggcgtgccaggatggtgtcgagtgtggtgcgagtcgccgtttgagcaaggtcaagttggttgaaacgctcggtcgtcgaagtgatcgttgaatcaagccgttcatgcatcgtcctaatgtcagcagcaagtccatcaacttctccccttacttcctgcaactgggcatccaccatgtcgtgtgctcctgccatagttagtgcaaacaccaaaacaccaaaaggagaaaaaaccaacgacaaaaacaggggtgtactgctcacaaggcgctcacactagtgctgttatcaagttcttatccgttcttaccaagccacagtggtgaactgcaatcaacaggtggaaccggtgaaagattggatgagcgattgcgtggaaaaacagaaacctgctcgtcgtagaaatatgtggagttgtgggtaggctgcactcaagtcaaggattagcacgatcaaacaataatgcaaagttgaattatagtgcaaaacacgaaactatattgctggccacaggtgcaaaggatggatggaactagcagaatggcagtaacataaatattgtactagtgatgccaaaaaggcactagtagaaatcacaggtgattttgttttttcttttttgtatgatttttttgatatttttctcagcacaagaagcaacaagataggagcgacacgaagtttcacctaaaactgatatcagatgtggtctatagaaaatcaggaagttctctgaaaagcgtgcgagaactttgacgaatttttttctttattttcctgaatttttttgacaattttgtcgaaaccaaacagaccgaaggtgagtttggccgggctcagaatggtgtcaacaagctcctgtaaaaatttcagattttttggacacccgagcgaaaagttatgcccggtttacggaaggtacctcaagttatgttttaaaaacgaccgggatgaaacaaccgtatcctttctccttcgttttcttttttttgtttctgttttttttatgtaaccgaaggagaaaaacaaggaagcggtcgttgactcggtttgtttttttttctgttttttttcgtaaccgaaggagaaaatcaaggaaacggccgttgactcggtttgttttttctgttttttttgacgtaaccgaaggagaaaaacaaggaaacaatgttgactcggtttgtggcgtgatcaaacgggagatggtggcggcgctagggtttgaatggtggaagaacacaatgcaaccagcaacaaatgacgcgaaagcacacaaattcaacaatgcagattattgaaagaaagtgcgaggctcaaaagggtgctgggatgtgatacccggtttgcaaagaagagaagttgaaggttattctttttgtttgtttttttctcttattcgggtgtcgcgctttggggatttagaatttatggaaaacattcaccagtatagcagtagagtggttggtcgggagctgtcgtgcaagcgagttgggccgcgaatcgcaatccggcccactaacccttccctaaccctagccgccgcccccctttttcccccttgggttgttgcagccgcccccttcccctcccctttctcttggacgccccccccctctcccatcttcttcctcctcaaatctttgcagccctcaccacccaaaaccctagccgcccccccatttctccccctcctccaaggtgcagccctcccgtgtggttctccgtcgtgtggctgcgatctcaattggagtttggagggaggaagaaggaaggaggaagggaagaacctaaggtgaatttgtgattaacttttgttgtttttgtgctgcaatcaattggattatgtgtttatctttgcgaatcggtagaggtgctgtccaggaattttgtgagtgggtgaacagcagtagttctagggatttctgggaattttcgtggggtaattagtgggaatcagtgggataatcatgtagagctttgtcatacctttccaacgagtacttatgcgctcgattcggagttataatttaggagatatcgttgtttgaatccgggtatgttgctgtccaaaaaaacagatttttcaggtggatgaacagcagtagtattagcagtttctgggaatttttcgtggttaattagtgctaaccagtatgataatcatgtagggctttgtcttatctttccaatgagtacttatgtgcttgatttggaattatattttaaaagatatcgctgtttgaatccgggtatgttgctgtaaaaaaaaacagatttttcaggtgggtgaacagcagcagtattagcaatttctgggaatttttcgtggttaattagtgctaaccagtatgataatcatgtatggctttgtcttatctttccaatgagtacttatgcgcttgaattggaattatattttaaaagatatcgctgtttgaatccgggtatgtcgctgtccaaaagagaaaaaaacagattacagggtgcatcttgtgaactgttttgggctaattagatgttggaatttaattataaattgtatacaaaacttgtggggaattttatgtagatgcctctggagtttttgtttgttaccaatgctgtcataattttgaagttatgaaattattaagcagcgccgctgcagtttggtgggtgtggggagagatgtaacccgcggcggggtttgagtttgtgcgtaggtgcggcgtcgtttatgagcctggttatgtgaaattggtgcactaagttgtgtgtcaaaaacaggtggtggacttccggatcgtacttagggatttgcccaaacttccggtaaaggcaagtaaatacagtggtggttgctaccgtttggtttgcatcctattccctgtcattgagtatgcataagtttta

SEQ ID NO: 724 - DNA, 8615 bp, Zea mays
  source (0)...(0): Zea mays BAC clone full insert sequence contig bacm2.pk116.g16.fis19
cgttgccgcacgtcacccattccgaaaacgggtgtcggggtgcatacaaagcacgagtttttgccactgaaaccatttcgtcgttttctgcaacgaacatgcccattccacaactttaggtccaaaactcatgttggggtggtttcgtgccatttcgttgacgcacgtcacccattccgaaaacggatgtcgggtgcatacaaagcacgagttttcgccagcggaacctttttttcgttttgcgcaacgaacatgcccaatccactactttaggtccaaaactcatgtttggggtggtttcgcgcagtttcgttgccgcacgtcacccattccgaaaatgggtgttggggtgcatacaaagcacgagttttcgccaccggaaccatttcttcgtttttcacaatgaacatgcccaatccactactttaggtccaaaactcatgtttggggtggtttcgcgctatatcgttgccgcacgtcacccattccgaaaacgggtgtcggggtgcatacaaagcacgagtttttgccaccggaaccatttcgtcgttttttgcaacgaacatgcccaatccacaactttaggtccaaaactcatgtttgggtggtttcgcgcaatttcgttgacgcacgtcacccattccgaaaacgggtgtcgcatacaaagcacgagttttcgccaccggaaccttttctttgttttttgcaacgaacatgcccaatccactactttaggtccaaaactcatgtttggggtggttttgcacaatttcgttgccgcatgtcacccattccgaaaacgggtgtcagggtgcatacaaagcatgagttttcgccaccggaatcatttcttcatttttcacaacgaacatgcccaatccactactttaggtccaaaactcatgtttggggtggtttcgcgcaatttcgttgccgcacgtcacccattccgaaaacgggtgtcgaggtgcatacaaagcacgagtttttgccaccggaaccattttgtcgttttttgcaatgaacatgcccaatccacaactttaggtccaaaactcatgtttgggtggtttctcgcaatttcgttgacgcacgtcacccattccgaaaacgggtgtcggggtgcatacaaagcacgagttttcgccaccagaaccttttctttgttttgcgcaacgaacatgcccaatccactactttaggtccaaaactcatgtttgggtggttttgcgcatttttgttgccgcacgtcacccattccgaaaaagggggtggggggtgcatacaaagcatgagttttcgccaccggaaccatttcttcgtttttcacaacgaacatgcccaatccactactttaggtccaaaactcatgtttggggtggtttcgcgcaatttcgttgccgcacgtcacccattccgaaaacgggtgtcggggtgcatacgaagcacgagtttttgccaccgaaaccattttgtcgttttttgcaacgaacatgcccaatccacaactttaggtccaaaactcatgtttgggtggtttctcgttatatcgttgccgcacgtcacccattccgaaaacgggtgtcggggtgcatacaaagcatgagttttcgccaccggaatcatttcttcatttttcacaacgaacatgcccaatccactactttaggtccaaaactcatgtttggggtggtttcgcgcaatttcgttgccacacgtcacccattccgaaaatgggtgtcggggtgcatacaaagcatgagttttcgccaccggaaccatttcttcgttttgcgcaatgaacatgcccaatccactactttaggtccaaaactcatgtttggggtggttttgcgcattttcgttgccgcacgtcacccattccgaaaatgggtgtcggggtgcatacaaagcatgagttttcgccaccggaaccatttcttcgtttttcacaacgaacatgcccaatccactactttaggtccaaaactcatgtttggggtggtttcgcgcaatttcgttgccgcacgtcacccattccaaaaacggatgtcgggtgcatacaaagcacgagttttcgccaccggaaccatttcttcgtttttcgcaacgaacatgcccaatccactactttaggtccaaaactcatgtttggggtggtttcgcgcaatttcgttgccgcacgtcacccattccgaaaacgggtgtcgggtgcatacaaagcacgggttttcgccaccagaaccatttcttcgtttttcgcaacgaacatgcccaatccactactttaggtccaaaactcatgtttggggttgtttcgcgctatatcgttgccgcacgtcacccattccgaaaacgggtgtcggggtgcatacaaagcacgagtttttgccaccgaaaccatttcgtcgttttttgcaacgaacatgcccaatccacaactttaggtccaaaactcatgtttgggtggtttcgcgcaatttcgttgacgcacgtcacccattccgaaaacgggtgtcacggtgcatacaaagcatgagttttcgccaccggaatcatttcttcatttttcacaacgaacatgcccaatccactactttaggtccaaaactcatgtttggggtggtttcgtgcaattttgttgccgcacgtcacccattccgaaaacgggtgtcggggtgcatacaaagcacgagttttcgccaccggaaccatttgttcatttttcacaacgaacatgcccaatccactacttttggtccaaaactcatgtttggggtggtttcgcgcaattttgttgccgcacgtcacccattccgaaaatgggtgtcggggtgcatacaaagcacgagttttttcgccaccggaaccatttcttcgttttgcgcaacgaacatgcccaatccactactttaggtccaaaactcatgtttggggtggtttcgcacaatttcgttgttgtacgtcacccattcccaaaacgggtgtcggggtgcatacaaagcatgagtttttgccaccggaagcaattcttcgtttttcgcaaagaacatgcccaatccactactttaggtccaaaactcatgtttggggtggtttcgcgctatatcgttgtcgcacgtcactcattccgaaaacggttgtcggggtgcatacaaagcacgagtttttgccaccggaaccatttcgtcattttttgcaacgaacttgcccaatccacaactttaggtccaaaactcatgtttgggtggtttcgcgcaatttcgttgacgcacgtcacccgttccgaaaacgggtgtctgggtgcatacaaagcacgagttttcgccaccggaaccattcctttgtttttcgcaatgaacatgcccaatcccctactttatgtccaaaactcatgtttggggtggtttcgcacaatttcgttgccgcacgtcacccattccgaaaatgggtgtcggtgtgcatacaaagcatgagttttcgccaccggaatcattttttcatttttcacaacgaacatgcccaatccactactttaggtccaaaactcatgtttggggtggttttgcgcattttcgttgccgcacgtcacccattccgaaaatgggtgtcggggtgcatacaaagcacgagttttctccaccggaaccatttcttcgttttgcgcaacgaacatgcccaatccactactttaggtccaaaactcatgtttggggtggtttcgcacaatttcgttgtcgtacgtcacccattcccaaaacgggtgtcggggtgcatacaaagcacgagtttttgccaccggaaacaattcttcgtttttcgcaacgaacatgcccaatccactactttaggtccaaaactcatgtttgggggtggtttcgcgctatatcgttgccgcacgtcacccattccgaaaacgggtgtcggggtgcatacaaagcacgagtttttgccaccggaaccatttcttcgtttttacaacgaacatgcccaatccactactttaggtccaaaactcatgtttggggtggtttcgcgcaatttcgttgccgcacgtcacccattccaaaaacgggtgtcggggtgcatacaaaacacgagttttcgccaccggaatcatttcctcgtttttcacaatgaacatgcccaatccactactttaggtccaaaactcatgtttggggtggtttcgagcaatttcgttgtcgtacgtcacccattcccaaaacgtgtgtcggggtgcatacaaagcacgagtttttgccaccggaaccatttgttcgttttgcgcaacgaacatgcccaatccactactttaggtccaaaactcatgtttggggtggtttcgcacaatttcgttgccgcacgtcacccattccgaaaacgggtgtcgcggtgcatacaaagcatgagttttcgccaccggaaccatttcttcgtttttcacaacgaacatgcccaatccactactttaggtccaaaattcatgtttggggtggtttcgcgcaatttcgttgccgcacgtcacccattccgaaaacggatgtcgggtgcatgcaaagcacgagttttcgccaccggaaccattttttcgttttgcgcaacgaacatgcccaatccactactttaggtccaaaactcatgtttggggtggttttgcgcatttttgttgccgcacgtcacccattccgaaaatgggtgtcggggtgcatacaaagcatgagttttcgccaccggaaccatttcttcgtttttcacaacgaacatgcccaatccactactttaggtccaaaactcatgtttggggtggtttcgcgcaatttcgttgccgcacgtcacccattccgaaaacgggtgtcgggtgcatacaaagcacgagtttttgccaccggaaccattttgtcgttttttgcaacgaacatgcccaatccacaactttaggtccaaaactcatgtttgggtggtttctcgcaatttcgttgccgcacgtcacccattccgaaaacgggtttcggggtgcatacaaagcacgagttttcgccaccggaaccatttcttcgtttttcgcaatgaacatgcccaatcccctactttaggtccaaaactcatgtttctggtggtttcacgcaatttcgttgccgcacgtcacccattccgaaaacgagtgtcggggtgcatacaaagcatgagttttcgccaccggaatcatttcttcatttttcacaacgaacatgcccaatccactacttttggtccaaaactcatgtttggggtggtttcgcacaatttcgttgtcgcacgtcacccattccgaaaatgggtgtcggggtgcatacaaagcatgagttttcgccaccggaaccatttcttcgttttgcgcaacgaacatgcccaatccactactttaggtccaaaactcatgtttggggtggttttgcgcaatttcgttgtctcacgtcacccattccgaaaatgggtgtcgcggtgcatacaaagcatgagttttcgccaccggaaccatttcttcgtttttcacaacgaacatgcccaatccactactttaggtccaaaactcatgtttctggtggtttcacgcagtttcgttgccgcacgtcacccattccgaaaacgagtgtcggggtgcatacaaagcatgagttttcgccaccggaatcatttcttcatttttcacaacgaacatgcccaatccactacttttggtccaaaactcatgtttggggtggtttcgcacaatttcgttgtcgcacgtcacccattccgaaaatgggtgtcggggtgcatacaaagcatgagttttcgccaccggaaccatttcttcgttttgcgcaacgaacatgcccaatccactactttaggtccaaaactcatgtttggggtggttttgcgcattttcgttgcctcacgtcacccattccaaaaatgggtgtcgcggtgcatacaaagcatgagttttcgccaccggaaccatttcttcttttttcacaacgaacatgcccaatccactactttaggtccaaaactcatgtttggggtggtttcgcgcaatttcgttgccgcacgtcacccattccgaaaacgggtgtcgggtgcatacaaagcacgagttttcgccaccggaaccatttcttcgtttttcgcaacgaacatgcccaatccactactttatgtccaaaactcatgtttggggtggtttcgcgctatatcgttggcgcacgtcacccattccgaaaacgggtgtcggggtgcatacaaagcacgagtttttgccaccggaaccatttcgtcgttttttgcaacgaacatgcccaatccacaactttaggtccaaaactcatgtttgggtggtttctcgcaatttcgttgccgcacgtcacccattctgaaaacgggtttcggggtgcatacaaagcacgagttttcgccaccggaaccatttctttgtttttcgcgatgaacatgcccaatcccctactttaggtccaaaactcatgtttgtggtggtttcgcgcattttcgttgccgcacgtcacccattccgaaaacgggtgtcggggtgcatacaaagcacgagtttttgccaccggaaccattttttctttttttgcaacgaacatgcccaatccacaactttaggtccaaaactcatgtttgggtggtttctcgttatatcgttgccgcacgtcacccattccgaaaacgagtgtcggggtgcatacaaagcatgaattttcgccaccggaatcatttctacattttcacaacgaacatgcccaatccactactttaggtccaaaactcatgtttggggtggtttcgcgcaatttcgttgccgcacgtcacccattccggaaatggttgtcggggtgcatacaaagcacgagttttcgccaccggaaccatttcttcgttttgcgcaacgaacatgcccaatccactactttaggtccaaaactcatgtttggggtggtttcacacaatttcgttgccgcacgtcacccattccgaaaacgggtgtcggggtgcatacaaagcatgagttttcgccaccggaaccatttcttcgtttttcacaacgaacatgcccaatccactactttaggtccaaaattcatgtttggggtggtttcgcgcaattttgttgccgcacgtcacccattccgaaaacggatgtcgggtgcatgcaaagcaagagttttcgccaccggaaccatttcttcgttttgcgcaacaaacatgcccaatccactactttaggtccaaaactcatgtttggggtggttttgcgcattttcgttgccgcacgtcacccattccgaaaatgggtgtcggggtgcatacaaagcatgagttttcgccaccggaaccatttcttcgtttttcacaacgaacatgcccaatccactactttaggtccaaaactcatatttggggtggtttcgcgcaatttcgttgccgcacgtcacccattcggaaaacgggtgtcgggtgcatacaaagcacgagttttcgccaccggaaccatttcttcgtttttcgcaacgaacatgcccaatccactactttaggtccaaaactcatgtttggggtggtttcgcgctatatcgttgccgcacgtcacccattccgaaaacgggtgtcggggtgcatacaaagcacgagtttttgccaccggaaccatttcttcttttttacaacgaaaatgccccatcccctacattttgtgcaaaaatctcgtgtggggggggttctcgcaatttttttgccccacgtcaccccttcccaaaacgggggtcggggtgcatacaaaacacaagttttctccccccgaaccatttcttcgtttttcacaacgaacaagcccaatccactactttaggtccaaaaatcatgtttgtggtggtttcgcgcaatttcgttgccgcacgtcacccattccgaaaatgggtgtcggggtgcatacaaacacgagttttcgccatcggaaccatttcttcgttttgcgcaacgaacatgcccaatccactactttaggtccaaaactcatgtttggggtggttttgcgcaatttctttgccgcacgtcactcattccgaaaacgggtgttggggtgcatacaagcacgaattttttccaccggaaccatttcttcttttttttcaacgaacatgccccatccactactttatgtccaaaaccaatgtttgggggggtttctcccaatttctttgcagcacgtcacccattccgaaaacgggggtcggggggcatacaaaccaccagatttcgccaccggaacaatttcttcttttttctcaacgaacaagccccctcccccactttaagtccaaaaaaaatgttggggggggttttgcgcactttcgttatcacatgtcgcaacttacgaaaaaagggtgttgggagggatatctagaaaaaattttctgcacccgaaccatttgttctttttttcatcacgcaaagggcccaccccactacctgttgatgacatcttatgaataaggtggttacttgcaagttcgtgcccaccctttcccctcttaaaaaaaggggaatgctggtctttattattcacc

SEQ ID NO: 725 - DNA, 9525 bp, Zea mays
  source (0)...(0): Zea mays BAC clone full insert sequence contig bacm2.pk116.g16.fis20
gctcatccaatctttcaccggttccacctgttggttgcagttcaccactgtggcttggtaagaacggataaaacttgataacaacattccattgagcgagttgtcaccaccatttccctgttgtcgtcggtttttctccttttggtgttttggtgtttgtgctaactatggcaggagcacacgacacggtggatgcccagttgctggaagtaaggggacaagttgatggacttgctgctgacattaggacgatgcaggaacgacttgattcaacggtcacttcgacgaccgagcatttcaaccagcttgaccttgctcaaacggcgactcgcaccacactcgacaccatcctggcacgccttgatgcattgaccacaaagatggagcaggactacggcggtgacactgagcaggacgatggagatcatcgtggtcgtgcacgccgtgtggttcatcatccccttaatgacttattttctaagattaaatttaaaattccaccttttaatggcaaatatgatcctgctgcatatcttgattgggagttagaggtggaacaaaaattttcatgccatgatattgctgcacattctcaggttaaagttgctattagtgaatttactgattttgctttaatttggtggcgtgagtataagataaaacatcccacttccattccaaccacttgggatcagttgaaagctgcgatgtgacatcgatttgtgccttcgtattatgctcgtgatttgcttaataaaatgcagcgttttcagcaaggttctcaatctgttgaggactatttccaggagttacaaaaaggtatgattcgttgtgggatattggaggacaacgacggcattgagcaccagatcgacctcatccccggcgcacagcttccgaaccgcgcaccgtaccgtacaaatccggatgagacgaaggagattcagcgccaggtacaggtgttgcttgacaagggatacattcgtgagtctcttagcccttgctctattcctgtgttacttgttcccaagaaagatgggtcatggcgtatgtgtgtagactgtcgtgctattaataacatcactattcgttatcgatatcctataccacgccttgatgatatgctagatgagcttagtggtgccattattttcactaagattgatttgcgtagtggttaccactagattagaatgaaactgggtgatgaatggaaaacggcttttaaaacgaaatttggtttatatgtgatgtagctgaggggcccgatctttcggcgagtagagataattccgatttggcggaagatgacccttgcgatccgactacgacgagcaagcccgaggcgccaatgcaatcgctgaaccaactccctatggttaccgaccttgctgatgcgagatcgggctgatcacgaagatcgtttcctatgcgcaatcgaagaacgaacaagaaaaagatgcgagcaatctaatctattactcgagggtggagttctgaatacacgaagacagcgcagatttgcgcgtgttcgagagtagctaaggctaacgtaaaacaaaactcgaaaataaaggaggcgcaactcctgcataaatagagggggcgcagcccctagggcggccaaccctaggtcgtccactatgggccgcagttgggctggtcgtctattcttctgggccctcattcttcagtagcatgacgaagttaagatctctggcacgggcccgagtgattggcccagctaatgaaggaagtggcgcttgatgtggaggtgctgctggtgtagtcgtactcatagtgatgtcctcatcatcctccccttcttgaagtgaagtcgtcctcgacgacaactcctcatcctcggccatatatggtttcaaatctgcaacattaaaactagtggaaacaccaaattccgcaggcaggtcaaggatataagcattatcattaatctttgttagcaccttaaaaggaccagcagcacgaggcattaatttagaacggcgcaaagtaggaaaccgatcctttctcaagtgcaaccaaaccatatcacctggctcaaaagtaacatgttttcttcctttactaccagcaacctgattttttgcattagtagcagcaatgttctgtttcgtttgttcatgtatggtaatcatttgttcaacatgtgcagcagcatctatatgtggggcgttcgcagcattaagtgaaatcaaatcaataggtgccctagggatgtaaccataaataatctggaaagggcacatctttgtagaagaatgcgtggcatgattgtaagcaaattcaacatgaggcaagcaatcctcccaacgtctcaaattcttgtctaaaacagccctaaacatggtagataaagttctatttactacatcagtttgtccatcagtctgagggtgacaagtagtgctaaacaacaatttagttcccaatttattccaaagagatctccaaaaatggcttagaaacttagcatcgcgatcagagactattgtttttggaataccatgtaaacgaataatttctctaaagaacaattcagcaacaatgctagcatcatcagttttatgacaaggtataaagtgagccattttagagaatctatcaacaaccacaaaaatactatccctccccttcttagttctaggcaagcccaaaacaaagtccatagagatatcaagccaaggagaagaagggacaggcaaaggcatatacaaaccatggttgttcaaccgtgacttagctttttgacaagtagtgcagcgtgcaacaaggcactcaacatcagcgcgcatccgaggccaaaagaagtgggcagccaacacctcatgcgttttgtagacgccaaaatgccccatgagaccgcctccatgcgcctcctgtaacaacaaaagacgaaccgaactagctggaacacacagcttgttagcacgaaacaggaacccatcttgtatgtgaaatttgccccatggtatcccattaatacaatggccgaaagcatctttaaaatcagcatcgtcaacatattgatcctttacagtgtccaaaccaaagattttaaaatctaattgtgacagcatggtatagcgacgagacaaagcatcagcaataacattgtccttcccgttcttgtgtttaataatgtaaggaaaggactcaatgaattcgacccatttagcatgacgacggttcagatttgtttgggtacgaatatgttttaaagcctcatgatcagaatggattatgaactcatgatgccaaagatagtgctgccatgtatgcaaagtgcgcactaaagcgtaaagctccttatcataagtagaatatttcagactagcaccgcttaatttttcactaaaataagcaactagttttccttcttgtaacaaaacaacacctagcccaataccgctagcatcgcattcaagctcaaaaactttattaaaatcagacaattgcaagaggggagcttgggttaacttatctttcaaagtgctgaacgctacctcctgcgaatcactccaagcaaacggcacatctttctttgtaagctcatgtagaggcgctgcaatggagctaaaatcacgaacaaatctgcggtagaaaccggcaagtccaagaaagctctgaatttgtgtgaccgtcgttggtgtaggccactcccgaatggcagcaatcttgctgctatccacctcaatgccctgcggagtaaccacataaccaagaaacgagacacgttgcgtgcaaaatgtgcacttttccatgttaccaaacaagcgagcagcacgcaaagcatcaaaaacagcacgcaaatgttctaaatgctcctctatagacttgctgtaaataaggatatcatcgaaataaacaacaacaaacaaacctatgaaggcccgtagaacttcgttcattaaacgcataaaggtgctgggagcattagtcaatccaaatggcataaccaaccattcatataaaccaaatttcgttttaaaagccgttttccattcatcaccgagtttcattctaatctgatggtaaccgctacgcaaatcaaccttagagaaaataacggcaccactaagctcatctaacatatcatcaaggcgtggaataggatatcgataacgaactgtgatgttattaatagcacgacaatctacgcacattcgccatgacccatctttctttggaacgagtaaaacaggaaccgagcaagggctaagagactcacgaatgtaacccttatcaagcagcgtctgcacctggcgctggatctccttcgtctcctctggatttgtacggtacggggcgcggttcggaagagaagcgccggggatgagatcgatctgatgctcaatgccacggaggggaggaagacccggtggtaagtccgtaggataaacatcagcatactcctgcaaaaggttaacaacagtagggggtatatccaaagacggtgcatcatcaagcggaacaagcatgcgcgagcatacaagtgcataacagggcatatgagcttcatggagatcatcaaaatcagcacgtgtagcaagtaaaacaggagagtgcaacttgatttcagatttaataggtgcggctgatgtcgatttgacttgttgtgcagttttagcagccctagtaagatcatctttcaaaatttggtcaggggtcattggatgtataattattttctggcctttaaacatgaaagaataatgatttgaacgaccatgatgtaaactatcagtatcatattgccaaggtcgacccaataacaaagagcatgcttccataggaataacatcgcaatcagcataatcagaataagaacccagcgaaaaggggacacgtaccgaacgtgttacctttattttaccaccatcattaagccattgaatgtgatacggatgtggatgtgtgcgagtgggcaaggataatttctctaccaacgctgtacttgccaaattgttgcagctgccactatcgatgatgatgcgaatcgaccgttcgtgcacgacgcccttggtatggaatagagtgtgtcgctgatttttttcggcctgggcaacctgtgtgctgagaacacgctgcacaacaagactctcatacctatcggcgtcgataggatcaacgtggacttcctcattttctgcatggttagtggcaatcatagcatgaccagtttcctcagaatcactggctgaagagtactcaccattgtcacgtataagcaaggtacgcttgtttgggcagtctcgaatcatgtgcccaaaccctctgcaacgatggcactgaatatcccgtgtacgtcctgtggaagaagcggcgcctttggcagggggcgccactggcttggtcgtccctgtgcgcgatgtagtgctaggcgtagaaggtgcagggctggaaggagttgagctgtgtgttggaccccggcctgcaaaagaattagtatatgtctttgatcgtcgtccctgcacttcacgttcagctttgcaagcatattcaaacaatgtggttatatcaaaataatccttataatcaagtatatcctgaatttccctgttcaaaccaccacgaaaacgcgccatagcagcgtcatctgactcaaccaaaccacaacgaagcatacccttttgtaactcctagtaatattcctcaacagatagtgaaccttgttgaaaacgctgcattttgttaagcaaatcacgagcataataggaaggaacaaatctgtggcgcatggcagtttttaattgggtccaagtaatgacactgttaatgggaagtttttgtttatactcacgccaccaaattaaagcaaaattagtaaattcactaatggcagccttcacttggctattagcaggaatatcatggcatgaaaatttctgttctacctccaattcccaatcaagatatgcagcaggatcatatttaccattaaaagatggaattttaaatttaatcttagaaaataagtcattagggggatgacgaaccacacgacgtgcacgaccacggcgatctccatcgtccagctcagtgtcaccgccgtattcctgctccatctttgtggtcaatgcatcaaggcgtgccaggatggtgtcgagtgtggtgcgagtcgccgtttgagcaaggtcaagctggttgaaatgctcggtcgtcgaagtgaccgttgaatcaagtcgttcctgcatcgtcctaatgtcagcagcaagtccatcaacttgtccccttacttccagcaactgggcatccaccgtgtcgtgtgctcctgccatagttagcacaaacaccaaaacaccaaaaggagaaaaaccgacgacaacagggaaatggtggtgacaactcgctcaatggaatgttgttatcaagttttatccgttcttaccaagccacagtggtgaactgcaaccaacaggtggaaccggtgaaagattggatgagcgattgcctggagaaacagaaaacttgtcgtcgtagaaatatgtggggttttgggtaggctgcagtcaagtcaaggattagcacgatcaaacaaaaatgcaaagttgaattatagtgcaaaacacgaaactatattgctggccacaagtgcaaaggatggatggaactagcagaatgacagtaccgtaaatattgtactagcgaggccaaaaaggcactagtaggaatcacaagtgattttgtttttctttttttgtatgattttttgatatttttctcagcacaaggagcaacaaaataggagctacacgaagttaaacctgaaacagagttcagatgtggtctacagaaaatcaggaagttctctgaaaagcgtgcgagaactttgacgaattttttctttattttcctgatttttttgacaattttatcgaaaccaaacaggctagtttggccagcctcagaatggtgtcaacaagctcctataaaaatttcagattttttgaacaaccgagcgaaaagttatgcccgatttaaggaaggtatgtttaaaacgaccgagatgagacaaccgctttgtatcctttctccttcgttttttttgtttctgttttttttacgtaaccgaaggagaaaaacaaggaagcggcattgactcggtttgttttttttctgttttttggcgtaaccgaaggagaaaaataaggaagcggcgttgactcggttttttggcgtgatcaaacggaatatggtggcggcgcgctagggtttgaatggtggaataacacaatgcaaccagcaacaaatgacgtgaaagcacacaaattcaacaatgcagattattgaaagaaagtgcgaggctcaaaagggtgctaggataaggtctaacctaaatttatatgtggttttgtggactgtaggagaaaaaaaacactcgataaactcacaaatcaacctggaaatctgataccacttgatagagttggagtgcccgatctttcggtgagtggagataattccgatttggtggaagtagaccctcacgatccgactacgacgagtgaacccgaagcgccaatgcaatcgctgaactaactcccaatggttaccgaccttgctgatgcgagatcggcctgatcacgaagatcgtttcctgtgcgcaatcgaagaacgaacaagaaaaagatgcgagcaatcttaatatcactcgaggtggagttctgaatcacagaggacagcacgtatttgtgcgtgttctggggtagctaaagctatatgtaaaacaaaactcaagttctaaatgaaacaggactctgactaaatagaggagaggcgtgaacagtaggcccgacgctacagtaccgcggttactgtttacgacttccctaggcgccccatccgggccttcctgttgggccatcttctaatcttctgggccttcgttctttaacagcatgatgtagttcaattctcttacacgggcccaagtcactggcccaggtggaaggggttgcgcctggactggggaagatggtgcctgggctggagaaggtgttgctggtgttgatgtactcgtgttggtgttgatgtcctcatcaaccccaaacatgagttttggacctaaagtagtggattgggcatgttcgttgcgaaaatcgaagaaatggttccggtggtgaactctcgtgctttgtatgtaccccgacccccattttcggatggatgacgtgctgcaacgaaattgtgcgaaaccaaacatgagttttggacctaaagtagtggattgggcatgttcgttgcgaaaaacgaagaaatagttccggtggcgaaaactcatgctttgtatgcacccgacacccgttttcggaaggggtgacgtgcggtaacgaaattgcgcgaaaccaccccaaacatgagttttggacctaaagtagtggattgggcatgttcgttgcaaaaaacgaagaaatgtttccggtggagaactcttgtgctttgtacgtaccccgacacccgttttcggaatgggtgacgtgctgcaacgaaattgcgcgaaaccaccccaaacatgagttttggacctaaagtagtggattgggcatgttcgttgcgaaaaacgaataaatagttccggtggcaaaaactcgtgcttgtatgcactgaaagggaattaggcttacacctatttcctaattgattttggtggttgaattgcccaacacaaataattggactaactagtttgctctagtctataagttatacaggtgccaaaggttcacacttagccaataaaaagaccaagaaatgggttcaacaaagagagcaagggataaccgaagcctgccatggtctggcgcaccggactgtccggtgtgccaacggacagtgtccggtgcaccaggggacagtgtccggtgcaccaggggactccaagccaaactcttcaccttcgggaattctcagaggcgcttcactataattcaccagactgtccggtgcaccaccggacagtgtccggtgccccagaggagagcgactctgaactcgccagcttcgggaatccgctccgctataattcaccggactgtccggtgagccagcggagcaacggctacttcgcgccaacggtcgactgcaacgcattaaatgcgcgccagcgcgcgcagaggagcagagcacgcgcgggtggcacaccggacagtctacaggacttgtccggtgcaccaccggacagccaggcgggcccacaagtcagagctccaacggtcggaacccaacggcctggtgacgtggctggcgcaccatacattgtccggtgtatcgcaatcttcgggttggtgttataccatgcccagtttattataatgtacacgatgcacttggacaaacgcaagatagcgccggggaattgcaagttatgctagcggctggaaagaattttttctacgtctgttttaagtttaacgcacatctgtgaacattcatatatttgatagtccgtaccccttccccgctctttgtattcacaagaaagccgactcctgtttcctttta

SEQ ID NO: 726 - DNA, 3618 bp, Zea mays
  source (0)...(0): Zea mays BAC clone full insert sequence contig bacm2.pk116.g16.fis21
cggccagtgccaagctcagatcagcttgcatgcctgcagtgcagcgtgacccggtcgtgcccctctctagagataatgagcattgcatgtctaagttataaaaaattaccacatattttttttgtcacacttgtttgaagtgcagtttatctatctttatacatatatttaaactttactctacgaataatataatctatagtactacaataatatcagtgttttagagaatcatataaatgaacagttagacatggtctaaaggacaattgagtattttgacaacaggactctacagttttatctttttagtgtgcatgtgttctcctttttttttgcaaatagcttcacctatataatacttcatccattttattagtacatccatttagggtttagggttaatggtttttatagactaatttttttagtacatctattttattctattttagcctctaaattaagaaaactaaaactctattttagtttttttatttaataatttagatataaaatagaataaaataaagtgactaaaaattaaacaaataccctttaagaaattaaaaaaactaaggaaacatttttcttgtttcgagtagataatgccagcctgttaaacgccgtcgacgagtctaacggacaccaaccagcgaaccagcagcgtcgcgtcgggccaagcgaagcagacggcacggcatctctgtcgctgcctctggacccctctcgagagttccgctccaccgttggacttgctccgctgtcggcatccagaaattgcgtggcggagcggcagacgtgagccggcacggcaggcggcctcctcctcctctcacggcaccggcagctacgggggattcctttcccaccgctccttcgctttcccttcctcgcccgccgtaataaatagacaccccctccacaccctctttccccaacctcgtgttgttcggagcgcacacacacacaaccagatctcccccaaatccacccgtcggcacctccgcttcaaggtacgccgctcgtcctccccccccccccccctctctaccttctctagatcggcgttccggtccatggttagggcccggtagttctacttctgttcatgtttgtgttagatccgtgtttgtgttagatccgtgctgctagcgttcgtacacggatgcgacctgtacgtcagacacgttctgattgctaacttgccagtgtttctctttggggaatcctgggatggctctagccgttccgcagacgggatcgatttcatgattttttttgtttcgttgcatagggtttggtttgcccttttcctttatttcaatatatgccgtgcacttgtttgtcgggtcatcttttcatgcttttttttgtcttggttgtgatgatgtggtctggttgggcggtcgttctagatcggagtagaattctgtttcaaactacctggtggatttattaattttggatctgtatgtgtgtgccatacatattcatagttacgaattgaagatgatggatggaaatatcgatctaggataggtatacatgttgatgcgggttttactgatgcatatacagagatgctttttgttcgcttggttgtgatgatgtggtgtggttgggcggtcgttcattcgttctagatcggagtagaatactgtttcaaactacctggtgtatttattaattttggaactgtatgtgtgtgtcatacatcttcatagttacgagtttaagatggatggaaatatcgatctaggataggtatacatgttgatgtgggttttactgatgcatatacatgatggcatatgcagcatctattcatatgctctaaccttgagtacctatctattataataaacaagtatgttttataattattttgatcttgatatacttggatgatggcatatgcagcagctatatgtggatttttttagccctgccttcatacgctatttatttgcttggtactgtttcttttgtcgatgctcaccctgttgtttggtgttacttctgcaggtcgaccgccggggatccacacgacaccatgtcccccgagcgccgccccgtcgagatccgcccggccaccgccgccgacatggccgccgtgtgcgacatcgtgaaccactacatcgagacctccaccgtgaacttccgcaccgagccgcagaccccgcaggagtggatcgacgacctggagcgcctccaggaccgctacccgtggctcgtggccgaggtggagggcgtggtggccggcatcgcctacgccggcccgtggaaggcccgcaacgcctacgactggaccgtggagtccaccgtgtacgtgtcccaccgccaccagcgcctcggcctcggctccaccctctacacccacctcctcaagagcatggaggcccagggcttcaagtccgtggtggccgtgatcggcctcccgaacgacccgtccgtgcgcctccacgaggccctcggctacaccgcccgcggcaccctccgcgccgccggctacaagcacggcggctggcacgacgtcggcttctggcagcgcgacttcgagctgccggccccgccgcgcccggtgcgcccggtgacgcagatggatccaccggtcgccaccatggcctcctccgagaacgtcatcaccgagttcatgcgcttcaaggtgcgcatggagggcaccgtgaacggccacgagttcgagatcgagggcgagggcgagggccgcccctacgagggccacaacaccgtgaagctgaaggtgaccaagggcggccccctgcccttcgcctgggacatcctgtccccccagttccagtacggctccaaggtgtacgtgaagcaccccgccgacatccccgactacaagaagctgtccttccccgagggcttcaagtgggagcgcgtgatgaacttcgaggacggcggcgtggcgaccgtgacccaggactcctccctgcaggacggctgcttcatctacaaggtgaagttcatcggcgtgaacttcccctccgacggccccgtgatgcagaagaagaccatgggctgggaggcctccaccgagcgcctgtacccccgcgacggcgtgctgaagggcgagacccacaaggccctgaagctgaaggacggcggccactacctggtggagttcaagtccatctacatggccaagaagcccgtgcagctgcccggctactactacgtggacgccaagctggacatcacctcccacaacgaggactacaccatcgtggagcagtacgagcgcaccgagggccgccaccacctgttcctgtagcggccggccgcaacctagacttgtccatcttctggattggccaacttaattaatgtatgaaataaaaggatgcacacatagtgacatgctaatcactataatgtgggcatcaaagttgtgtgttatgtgtaattactagtctgcagcatttggctaccttaagagagtcatagttatagctcgagcggccagcttgatatcgaattcgcccttagggggtttagggtttagggtttagggtttagggtttagggtttagggtttagggtttagggtttagggtttagggtttagggtttagggtttagggtttaggg

SEQ ID NO: 727 - DNA, 12337 bp, Zea mays
  source (0)...(0): Zea mays BAC clone full insert sequence contig bacm2.pk116.g16.fis22
cctcaggtatagtagggggtagggaactcgtgcagccgaaacccgggcggaacgctgctgaaaccatagcgtttccagcgtctcctccaggtctcctcggccgagccccgcaccccctcgcggcctagccgtggccggtcagcaccctaccgcgcccagctccagctggcgctgttggctgcctggccggccatggttcggccgtgacgcagccacgaccggctatggctggctagcgccggccagacgccctggacgagtggctgcactgtgggatggcccgttgctcgatgcgttttccatttctcccgtgctcggtggaccttcggtcgccgtcctcgcaagtagacccgccgcgcccagcgcggagggatgctttggatggctcgaccgtagcggctacgctggcgcatgagttgtcttggacccgtgactgcttggaggacccccgctgccgtgcagccgactcccggcgcccgtgtcccatcgttcgtgcgggcatcctgtgcctgctgcattgagaagtgcttgcgtgctgctacacgtcccacgggaagccgtggggatcctctagagcttgccaacgactacgcactagccaacaagagcttcagggttgagatgtgtataagagacagaacatgcccaatccactactttaggtccaaaactcatgtttgaggtggtttcacgcaatttcgttgccaagcacgagtttttgccaccggaaccatttcgtcctttttggcaacgaacatgcccaatccactactttaggtccaaaactcatgtttgggtggtttcgcgcaatttcgttgccgcacgtcacccattccgaaaacgggtgtcggggtgcatacaaagcacgagttttcgccaccggaaccatttcttcgtttttcgtaatgaacatgcccaaaccctactttaggtcgaaaactcatgtttggggtggtttcgcgcaatttcgttgccgcacgtcacccattccgaaaacgggtgtcggggtgcatacaaagcatgagttttcgccaccggaaccatttcttcgtttttcacaacgaacaagcccaatccactactttaggtccaaaaatcatgtttgtggtggtttcgcgcaatttcgttgccgcacgtcacccattccgaaaatgggtgtcggggtgcatacaaacacgagttttcgccatcggaaccatttcttcgttttgcgcaacgaacatgcccaatccactactttaggtccaaaactcatgtttggggtggttttgcgcaatttcgttgccgcacgtcactcattccgaaaacgggtgttggggtgcatacaagcacgagttttcgccaccggaaccatttcttcatttttcgcaacgaacatgcccaatccactactttaggtccaaaactaatgtttggggtggtttcgcgcaatttcgttgcagcacgtcacccattccgaaaacgggtgtcggggtgcatacaaagcacgagagttcgccaccggaaccatttcttcgtttttcgcaacgaacatgcccaatccactactttaggtccaaaactcatgtttggggtggttttgcgcaatttcgttaccgcaggtcacccattccgaaaatgggtgtcgggtgcatacaaagcatgagttttctccaccggaactatttcttcgtttttcgcaacgaacatgcccaatccactactttaggtccaaaactcatgtttggggtggtttcgcgcaatttcgttgtcgtacgtcacccattcccaaaacgggggtcggggtgcatacaaagcacgagtttttgccaccggaaccaattcttcatttttcgtaacgaacatgcccaatccactactttaggtccaaaactaatgtttggggtggtttcgcgcaatttcgttgtcgcacgtcacccattccgaaaacgggtgtcggggtgcatacaaagcactagttttcgccaccagaatcatttcttcgttttgcgcaacaaacatgcccagtccactactttaggtccaaaactcatgtttggggtggtttcgcgcaatttcgttgccgcacgtcaccaattccgaaaacgggtgtcgaggtgcatacaagcacgagtttttgccactggaaccatgtattcgtttttcgcaatgaacatgcccaatccactactttaggtccaaaactcatgtttggggtggtttcgcgcaatttcgttgtcgtacgtcacccattcccaaaacgggggtcggggtgcatacaaagcacgagtttttgccaccggaaccaattcttcgtttttcgtaacgaacatgcccaatccactactttaggtccaaaactcatgtttggggtggtttcgcgcaatttcgttgccgcacgtcatccattccgaaaacgggtgtcggggtgcatacaaagcacgagttttggccaccggaaccattttttcgtttttcgcaacgaacatgcccaattcactactttaggtccaaaactcatgtttggggtggtttcgcgcaatttcgttgccgcacgtcacccattccgaaaacggatgcggtgtgcatacaaagcacgagtttttgacaccggaaccatttctttgttttttgcaacgaacatgcctaatccactactttaggtccaaaactcatgtttggatggtttcgcgcaatttcgttgccgcacgtcacccattccaaaaatgggtgtcggggtgcatacaagcacgagttttcgccaccggaaccatttcttcgttttgcgcaacgaacatgcccaatccactactttaggtccaaaactcatgtttggggtggttttgcgcaatttcgttgccgcacgtcacccattccgaaaacgggggtcggggtgcatacaaagcacgagttttcgccaccggaaccatttcttcgtttttcgtaatgaacatgcccaaaccctactttaggtccaaaactcatgtttggggtggtttcgcgcaatttcgttgccgcacgtcacccattccgaaaacggttgccggggtgcatacaaagcatgagttttcgcaaccggaaccatttcttcgtttttcacaacgaacgtgcccaatccactactttaggtccaaaactcatgtttggggtggtttcgcgcaatttcgttgccgcacgtcacccattccgaaaatgggtgtcggggtgcataaaagcacgagttttcgccatcggaaccatttcttcgttttgcgcaacaaacatgcccaatccactactttaggtccaaaactcatgtttggggtggttttgcgcaatttcgttgccgcacgtcacccattacgaaaacgggtgccggggtgcatacaaagcacgagttttcgccaccggaaccatttcttcgttttgcgcaatgaacatgcccaatccactactttaggtccaaaactcatgtttgggggtggtttcacgcaatttcgttgccgcacgtcacccattccgaaaacgggtgtcggggtgcatacaagcaggagtttttgccaccggaaccatttattcgtttttcgcaacgaacaagcccaatccactactttaggtccaaaactcatgtttggggtggtttcacgcaatttcgttgccgcacgtcaccaattccgaaaacgggtgtcggggtgcacacaagcacgagatttcgccactggaaccatttcttcgtttttcgcaacgaacatgcccaatccactactttaggtccaaaactcatgtttggggtggtttcgcgcaatttcgttgccgcacgtcacccattccaaaaatgggtgtcggggtgcatacaagcacaagttttcgccatcgaaaccatttcttcgttttgcgcaacgaacatgcccaatccactactttaggtccaaaactcatgtttggggtggtttcgcgcaatttcgttgccgcacgtcaccaattccgaaaacgggtgtcggggtgcatacaagcaggagtttttgccaccggaaccatttattcgtttttcgcaacgaacatgcccaatccactactttaggtccaaaactcatgtttggggtggtttcgcgcaatttcgttgcagcacgtcaccaattccgaaaacgggtgtcggggtgcatacaagcacgagttttcgccaccggaacaatttcttcgttttgcgcaacgaacatgcccaatccactactttaggtccaaaactcaagtttggggtggttttgcgcaatttcgttgccgtacgtcacccattctgaaaatgggtgtcggggtgcataaaagcacgagttttcgccatcggaaccatttcttcgttttgcgcaacgaacatgcccaatccactactttaggtccaaaactcatgtttggggtggttttgcgcattttcgttgccgcacgtcacccattccgaaaacgggtgtcggggtgcatacaaagcacgagttttcgccaccggaaccatttcttcattttgcgcaatgaacatgcccaatccactactttaggtccaaaactcatgtttgggggtggtttcacgcaatttcgttgccgcacgtcaccaattccgaaaacgagtgtcggggtgcatacaagcaggagtttttgccaccgaaacctttttctcttttttcgcaacaaaaatgcacaatccactactttaggtccaaaactcatgttgggggtggtttcgcgcaatttcgttgccgcacgtcacccattccaaaaacgggtgtcggggtgcatacaaaacacgagttttcgccaccggaatcatttcttcgtttttcacaatgaacatgcccaatccactactttaggtccaaaactcatgttgggggtggtttcgagcaatttggttgtcgtacgtcacccattcccaaaaggggtgtgggggtgcatacaaagcaggagtttttgccaccggaaccatttttttgtttttcgcaaggaacatgcccaatcccctacttaggtccaaaactcatgtttggggtggttttgcacaatttcgttgctgcacgtcaccaattccgaaaacgggtgtcggggtgcatagaaagcacgggttttcgccaccggaaccatttcttcgttttgcgcaacgaacatgcccaatccactactttaggtccaaaactcatgtttggggtggttttgcgcaatttggttgccgcatgtcacccattccgaaaacgggtgtcggggtgcatacaaagcatgagttttcgccaccggaaccatttcttcgtttttacaacgaacatgcccaatccactactttaggtccaaaactcatgtttggggtggtttcgcgcaatttcgttgccgcacgtcacccattccaaaaacgggtgtcggggtgcatacaaaacacgagttttcgccaccggaatcatttcctcgtttttcacaatgaacaagcccaatccactactttaggtccaaaactcatgtttggggtggtttcgagcaatttcgttgtcgtacgtcacccattcccaaaacgtgtgtcggggtgcatacaaagcacgagtttttgccaccggaaccaattcttcgtttttcgcaacgaacatgcccaatccactactttaggtctaaaactcatgtttggggtggtttctcgttatatcgttgccgcacgtcacccattccgaaaacgggtgtcggtgtgcatacaaagcatgagttttcgccaccggaatcatttcttcatttttcacaacgaacaagtccaatccactactttaggtccaaaactcatgtttggggtggtttcgcgcaatttcgttgccacacgtcacccattccgaaaatgggtgtcggggtgcatacaaagcacgagttttctcgaccggaaccatttcttcattttgcgcaacgaacatgcccaatccactactttaggtccaaaactcatgtttggggtggtttcgcacaatttcgttgtcgtacgtcacccattcccaaaacgggtgtcggggtgcatacaaagcacgagtttttgccaccggaagcaattcttcgtttttcgcaacgaacatgcccaatccactactttaggtccaaaactcatgtttggggtggtttcgcgctatatcgttgccgcacgtcacccattcccaaaacgggtgtcggggtgcatacaaagctcgagtttttgccaccggaaccatttcgtcattttttgcaacgaacatgcccaatccacaactttaggtccaaaactcatgtttgggtggtttcgcgcaatttcgttgacgcacgtcacccgttccgaaaacgggtgtcggggtgcgtacaaagcacgagttttcgccaccggaaccatttctttgttttttgcaatgaacatgcccaatcccctactttagctccaaaactcatgtttggggtggtttcgcacaatttcgttgctgcacgtcacccattccgaaaacgggtgtcggggtgcatagaaagcacgagttttcgccaccggaaccatttcttcgttttgcgcaacgaacatgcccaatccactactttaggtccaaaactcatgtttggggtggttttgcgcaatttcgttgccgcacgtcacccattccgaaaacgggtgtcggggtgcatacaaagcattagttttcgccaccggaaccatttcttcgtttttcacaatgaacatgcccaatccactactttaggtccaaaactcatgtttggggtggtttcgcgcaatttcgttgccgcatgtcacccattccgaaaacgggtgtcggggtgcatacaaagcatgacttttcgccaccggaaccatttcttcgttttttacaacgaacatgcccaatccactactttaggtccaaaactcatgtttggggtggtttcgcgcaatttcgttgccgcacgtcacccattccgaaaacgggtgtcggggtgcatacaaaacacgagttttcgccaccagaaccatttctttgtttttcgcaatgaacctgcccaatccactactttaggtccaaaactcatgtttggggtggtttcgagcaatttcgttgtcgtacgtcacccattcccaaagcgtgtgtcggggtgcatacaaagcacgagtttttgccaccggaaccaattcttcgtttttcgcaacgaacatgcccaatccactactttaggtataaaactcatgtttgaggtggtttctcgttatatcgctgccgcacgtcacccattccgaaaacgggtgtcggggtgcatacaaagcacgagtttttgccaccagaaccatttcgtcgttttttgcaacgaacatgcccaatccacaactttaggtccaaaactcatgtttgggtagtttcgcgcaatttctttaacgcacgtcacccattccgaaaaagggtgtcggggtgcatacaaagcacgagttttcgccaccggaaccatttctttgtttttcgcaatgaacatgcccaatcccctactttaggtccaaaactcatgtttggactggtttcgcgcaatttcgttgccgcacgtcacccattccgaaaatgggtgtcggggtgcatacaaagcatgagttttcgccaccggaatcatttcttcatttttcacaacgaacatgcccctgtctcttatacacatctcaaccctgaagctcttgttggctagtgcgtagtcgttggcaagctctagaggatccccacggcttcccgtgggacgtgtagcagcacgcaagcacttctcaatgcagcaggcacaggatgcccgcacgaacgatgggacacgggcgccgggagtcggctgcacggcagcgggggtcctccaagcagtcacgggtccaagacaactcatgcgccagcgtagccgctacggtcgagccatccaaagcatccctccgcgctgggcgcggcgggtctacttgcgaggacggcgaccgaaggtccaccgagcacgggagaaatggaaaacgcatcgagcaacgggccatcccacagtgcagccactcgtccagggcgtctggccggcgctagccagccatagccggtcgtggctgcgtcacggccgaaccatggccggccaggcagccaacagcgccagctggagctgggcgcggtagggtgctgaccggccacggctaggccgcgagggggtgcggggctcggccgaggagacctggaggagacgctggaaacgctatggtttcagcagcgttccgcccgggtttcggctgcacgagttccctaccccctactatacctgaggggcataccccctcccaggacttcggggagttcagccttcagaaaaccagggtattttccctggacgccacgaaacccatctaagatggccggacacaacgtttttgctcagaatcaggggtttcgctagcgtgacccgttttccctcacgggtcgacccgaacttcgatgtctcacgcggggggaccacgggagggtcccgtgcccttccacgtgcccgtttttgcggccgtggccgaaaatccgtttttggcccgtgcgccatggcgaacccctcgttttcagcccaaacgcaaggccgaacagccctgccacccgtggcagcgcgcctccgagccgttttccctccgttccaccgtgcccttcactcaagacatgcactttaggttcggtgtctttccacatgcttggacttagcttattttcggggtcgtgcccgagcctcagttttcggcccgtgcgccatggcgaacccctcgttttcagcccaaacgcaaggccgaacagccctgccgcctgtggcagcgcgcctcctcccgttttccctccgttccaccttgcccttcactcaagacatgcactttaggttcggtgtctttccacatgcttggacttagcccgtttttgcggccgtggccgaacctcagttatcagcccgcgcgccatggcgaacacctcgttttcagcccaaacgcaaggccgaacagccctgccgcccgtggcagcgcgcctcctcccgttttccctccgttccaccttgcccttcactcaagacatgcactttaggttcggtgtctttccacacgcttggacttagcccgttttcgcggccgtggccgaacctcagttttcagcccgcgcgccatggcgaacacctcgttttcagcccaaacgcaaggccgaacagccctgccgcccgtggcagcgcgcctcctcccgttttccctccgttccaccttgcccttcactcaagacatgcactttaggttcggtgtctttccacacgcttggacttagcccgttttcgcggccgtggccgaacctcagttttcagcccgcgcgccatggcgaacacctcgttttcagcccaaacgcaaggccgaacagccctgccgcccgtggcagcgcgcctcctcccgttttccctccgttccaccttgcccttcactcaagacatgcactttaggttcggtgtctttccacatgcttggacttagcttattttcggggtcgtgcccgagcctcagttttcggcccgcgcgccatggcgaacacctcgttttcagcccaaacgcaaggccgaacagccctgccgcccgtggcagcgcgcctcctcccgttttccctccgttccaccgtgcccttcactcaagacatgcactttaggttcggtgtctttccacatgcttggacttagcttattttcggggtcgtgccctagcctcagttttcggcccgtgcgccatggcgaacccctcgttttcagcccaaacgcaaggccgaacagccctgccgcccgtcgccacgcgcctgctcccgttttccctccgttccaccttgcccttcacttaagacatgcactttaggttcggtgtctttccacaagcttggacttagctaattttggaggtcgtgcccgagcctccgatttcggcccgtgcgccatggcgaacccctcgttttcagcccatacgcaaggccgaacagccctaccgcccgttgccgcgtgcctccgtgtcgttttccctccgttccaccgtgcccttcaccaaagacatccactttaggttcggtgtgtttccacatgcttggacttagtttattttcgggttcgtgccacagccaccatttccggcccgcgcgccatggcgaaccacctgtttttagcccagacgcattgccgaacagccctgccgcccgtcgccgcgggcctccgtgtcgttttccctccgttccatcttgcccttcacccaagacatacacattagcttcggtgtctttccacacgcttggacttagcttatttccgaggccgtgccccagccgctgttttcggcccacgcgccatggcgaaaccctcgttttcagcccaaacgcaaggccgaacagccatgccgcccgtcgccgcgcgcctccgtgtcgttttccctccgttccaccgtgcccttcacccaagacatacacattagcttcggtgtctttccacacgcttggacttagcttatttccgaggccgtgccccagccgccgttttcggcccgcgcgccatggcgaaaccctcgttttcagcccaaacgcaaggccgaacagccatgccgcccgtcgccgcgcacctcctcccgttttccctccgttccaccttgaccttcactccagacatgcactttaggttcggtgtctttccaaacgctgggacttagcccgttttcggaccgtggccgaaccgttgttttcggaccacgcgccatggcgaacacctcgttttcagcccaaacacaaggacgaacatccctgccgcccgtcgccgtgcgcctccgtgccggagcctcagttcgtcgcgtgcctccgtgtcgttttccctccgttccactgtgcccttcaccaaagacatacactttaggttccgtgtctttccacacgcttggacttagcttattttcgagttcgtgcctgagcctcagttttcggcccgtgcgccatggcgaacacctcgttttcagccaggacgcaaggccgaacagccatgccgcccgtcgtcgcgtgcctccgtgtcgttttccctccgttccaccgtgcccttcactcaagacatacaaacaccttagcttcggtgtctttccattccacacgcttggacttagcttattttcgaggtcatgcccgagcctcagttttcggcccgtgcgccatggcgaacccctcgttttcagcccagacgcaaggccgaacagccctgccgcccgtcgccgcgcgcctccgtgccgttttccctctgttcctccgtgcccttcacccaagacatacatattagcttcggtgcctttccacacgcttggacttagcttattttcggggtcgtgcctgaacctcatttttcggcccgtgcgccatggcgaacccatcgttttcggcccaaacgcaaggccgaacagccatgccgcccgtcgtcgcgcgcctccgtgtcgttttccctccgttccaccgtgcccttcactcaagacatacatacaccttagcttcggtgtctttccattccacacgcttggacttagcctattttcgaggtcgtgccccggtcgccgtttgcggcccgcgcgccatggcgaacccctcgttttcagcctagacgcgtggccgaacagccctgccgcccatcgccaacgttccatcgtgcccttcacccaaggcatacgtaggagcttcggtttctttccacacgctgggacttagcttttcttgtggtcgtgcacgaactcacggcggttttcggcctcttgccacgctgcgccttggacgtttccgttcggaagatcggtgcccctctcccgtgggttcgaaacctagtcgctgggcgctgtgtagagtggggggagggacgaatccgtgcgacgcggggctggatctcagtggatcatggcagcaaggccactctgccacttacaatgccccgtcgcgttttaagtcgtctgcaaaggattcagcacgccgcccgttgggaagggagcttcgaggcggcccgccgcggcgcgtcgaccgggcgggctgagccaatggcacgggcccttggggcgcgaacgccctaacgtgggtcggggcgggcggcgagcagaggcgccggttgctagcttggattctgacttagaggcgttcagtcataatccggcacacggtagcttcgcgccactggcttttcaaccaagcgcgatgaccaattgtgtgaatcaacggttcctctcgtggagcttcggtccgggtcacctttgtccaccaagatggaactgcggccggccgctcattaattaagtcaggcgcgcctctagttgaagacacgttcatgtcttcatcgtaagaagacactcagtagtcttcggcca

SEQ ID NO: 728 - DNA, 13841 bp, Zea mays
  source (0)...(0): Zea mays BAC clone full insert sequence contig bacm2.pk116.g16.fis23
gtcgttcattattattagaactgtacgtatagatcggggttttggtgtaaagagagggaggcgtaaatgacatgatctagatcagatccgaaaaaaaaaacgacatatagaatacatagcggactgttcggagatgaaggaggacaagggaaagttagtaccaaaggtcatatgcagaaacgaaaaaagcgcgccagagcgcgcagaagtcaggcaagcgcgaaattgcgcaccggacaatctacaggaaatgtcaggtgtgccaccggacatccaggcgggcccagcagtcagagctccaacggtcggaacccaacggcctggtgacgtggatggcgcaccggacactgtccggtgtgcaccggactgtccggtgcaccatgcgacagacagcctccaccaaacggctagtttggtggttggggttataaatacccccaaccaccccacattcaagtcatccaagttttccaccttccaactacttacaagagctagacattcaatacaagacacactcaagtgatcaaatcctctcccaattccacaaaagctttagtgttaagtgagagagatttgttgtgttcttttgagctcttgcgcttggattgctttcttctttctcattctttcttgagatcaatactcacttgtaaccgaggcaagagacaccaattgtgtggtggtccttgcggggaagttttgttcccggttgatttgagaagagaaagctcactcggtccgagggaccgtttgagagagggaaggggttgaaaaagacccggcctttgtggcctcctcaacggggagtaggtttgcgagaaccgaacctcagtaaaacaaatccgcgtgtcacactctttattcgcttgcgatttgttttgcaccctctctcgcggactcgattatatttctaacgctaacccggcttgtagttgtgattaattttgtgaatttcagtttcgccctattcaccccccctctaggcgactttcaacaatcaacccatgctaaattgcctaaaaagaaaactcctagtgcatcaaatgaacatagcattttatttaaaacttttgatgaatcttatgtgttaactaacaaatccggcaaggtagttgccaaatatgttgggggcaagcacaaggggtcaaagacttgtgtttgggtacccaaagttcttgtgtctaatgccaaaggacccaaaaccatttgggtacctaaagtcaagaactaaacttgttttgtaggtttatgcatacgggggctcaagttggattatcgacagcgggtgcacaaaccacatgacaggggagaagaagatgttctcctcctatgagaaaaaccaagatcctcaacgagctatcacattcagggatgaaaaccaaggtttggtcaaaggattgggtaaaattgctatatcacctggccattccatttccaatgtttttcttgcagactctttagattacaatttgctttctatttcgcaattatgtcaaatgggctacaactgtctttttactgatgtaggtgtcactgtctttagaagaagtgatgattcaatagcatttaagggaatgttagagggtcagctatacttggtagattttgatagagctgaactcgacacttgcttaattgctaaaactaacgtgggttggctctagcaccgccgactagcccatgttggaatgaagaatcttcataagcttctaaagggagagcacattttaggattaacaaatgttcattttgaaaaagacaggatttatagcgcatgtcaagcagggaagcaagttggtactcatcatccacacaagaacatcatgacgactgacaggccactggaactcctacacatggacctattcggcccgatagcttatataagcatcggcgggagtaagtactgtctagttattgtggatgattattctcgcttcacttgggtattctttttgcaggaaaaatctcatacccaagaaaccttaaaaggattcttgagacgggctcaaaatgagatcagcttaaggatcaagaaaattagaagcgacaacgggacagagttcaagaactcacaaatcgaaggcttccttgaggaggagggcatcaagcatgagttctcttctccctacaccccacaacaaaatggtgtagtggagaggaagaatagaactctattggacatggcaagaaccatgcttaatgagtagaagacttcggatcggttttgggctgaggcggtcaacaccgcctgctacgccatcaaccggttatatctacaccgaatcctcaagaagacatcatatgaactccttactggtaaaaaccccaatatttcatattttagagtctttggcagcaaatgctttattcttgttaaaagaggtagaaaatctaaatttcctcctaagactgtagaaggctttttactaggatatgattcaaacacaagggcatatagagtctttaacaagtcctctggacaagttgaaatttcttgtgacgttgtgtttgatgagactaacggctctcaagaagagcaagttgatcttgatgagataggtgatgaagaggctccgtgcatcgcgctaaggaacatgtccattggggatgtgtgtcctaaggaatccgaagagcctccaaatgcacaagatcaaccatcctcctccacgcaagcatctccaccaactcaaaatgaggatgaggctcaagttgatgaaggagaagatcaatcaaatgagccacctcaagatgacggcaatgatcaagtgggagatgcaaatgatcaagataaggaggatgaagaaccaaggccgccacacccaagagtccaccaagcaacccaaagagatcaccccgtcgacaccatcctcggcgatattcataagggggtaactactagatctcgtgttgctcatttttgtgaacattactcttttgtttcctctattgagccacatagggtagaggaagcacttcaagattcggattgggtggtggcgatgcaagaggagctcaacaacttcactaggaacaaggtatggcatttggttccacgtcctaatcaaaatgttgtaggaaccaagtgggttttccgcaacaagcaagatgagcatggtgtggtgacaaggaacaaagcccgacttgtggccaactcccaagtcgaaggtttggatttcggtgaaacctatgcacccgtagctaggcttgagtcaattcgtatattattggcctatgctacttaccatggcttcaagctttatcaaatggacgtgaaaagtgccttcctcaatggaccaattaaggaagaggtctatgttgagcaacctcccggctttgaagatagtgagtaccctaaccatgtttacaaactctctaaggcgctttatgggctcaagcaagccccaagagcatggtacgaatgccttagagatttccttatcactaatggattcaaagtcggaaaagctgatccaactttatttactaaaactcttgacaatgatttgtttgtatgccaagtttatgttgatgatatcatatttgggtctactaacgaatctacatgtgaagaatttagtaggatcatgacacaaaaattcgagatgactatgatgggggagttgaagtacttcttaggatttcaagtgaagcaactccaagagggcacctttctaagccaaacgaagtatactcaagatattctaagcaagtttgggatgaaggatgccaaacccatcaagacacccatgggaaccaatgggcatctcgacctcgacacggaaggtaagtccgtggatcaaacggtataccggtcgatgataggttctttactctatttatgtgcatctcgaccggatattatgctttccgtatccatgtgtgcaagattccaagccgaccctaaggaagctcaccttacggccgtaaaacgaatcttgagatatttagtttatactcctaagtttgggctttggtatcctaggggatccacttttgatttaattggttattcgtatgccgattgggcggggtgtaaaattaatagaaagagcatatcggggacttgccagttcttgggaagatccttggtgtcttgggcttcaaagaagcaaaattccgtcgctctttctaccgccgaagctgagtatattgccgcaggtcattgttgcgcgcaattactttggatgaggcaaacccttcgggactatggttacaaattaaccaaagttcctcttctatgtgataatgagagtgcaatccgcatggcggataatcccgttgagcatagccgcactaaacacatagccattcggtatcattttctaagggatcaccaacaaaagggagatatcgagattgcatatattaacactaaagatctattagccgatatctttaccaagccacttgatgaacaaacctttaacaaacttaggcatgagctaaatattcttgattctaggaacttcttttgttgatttgcacacatagctcattcatatacaatcatgtctctttcatgtgctatgactaatgtgttttcaagttaatttcaaaccaagtcataggtatattgaaagggaattggagtcttcggcgaagacaaaggcttccactccgtaactcatccttcgccgtcgctccgagcatctctccggctttggtataatcttcactcatgttttatttgccaaaggggagaaagtagttttagaaagggctctaatgactccgtttttggtgatttatgccaaagggggagagagcatgagcccaaagcaaaaggaccgcacaccaccacctaattttaaaaatgattttcaattggaaatttcaaattggtatcttattgtgttgaaaaggggagaaagtagtattttcaaaatcgatatcaaaaccctcttgaacactaagaggaggatttctttgagagggagttttgtttagttaaaggaaaagcatttgaaacagggggagaaaatttcaaatcttgaaaatgcttcgcaaaatcttattcatttacctttgactatttgcaaaaggactttgaaaaggatttacaaaagaatttgcaaaaacaaaacaagtggtgcaagcgtggtccaaaatgtcaaaaattaaagaaacaatccatgcatatcttataagtatttatattggctcaattcaaagtaacctttgcacttacattatgcaaactagttcaattatgcacttctatatttgctttggtttgtgttggcatcaatcaccaaaaagggggagattgaaagggaattaggcttacacctatttcctaattgattttggtggttgaattgcccaacacaaataattggactaactagtttgctcttgtccggtgagccagcggaacaacggctacttcacgccaacggtcgactggaacgcgcgggtggcacaccggacagtctacaggacttgtctggtgcaccactggacagccaggcgggcccacaagtcagagctccaacggtcggaacccaacggcttggtgacgtggctggcgcaccggatagtgtccggtggcgcaccggactgtccggtgcgccatgcgacagcagcctccaccaaacggctagtttggtggttggggttataaatacccccaaccaccccccacattcaagtcatccaagttttccaccttccgactacttacaagagctctagcattcaattctagacacacccaagtgatcaaatcctctcccatttccacaaaagctttagtgttaagtgagagagatttgttgtgttcttttgagctcttgcgcttggattgctttcttctttctcattctttcttgagatcaatactcacttgtaaccgaggcaagagacaccaattgtgtggtggtccttgcggggaagttttgttcccgattgatttgagaagagaaagctcactcggtccgagggaccgtttgagagagggaaggggttgaaaaagacccggcctttgtggcctcctcaacggagagtaggtttgcgagaaccgaacctcggtaaaacaaatccgcgtgtcacactctttattcgcttgcgatttgttttgcaccctctctcgcggactcgattatatttctaacgctaacccggcttgtagttgtgattaattttgtgaatttcagtttcgccctattcacccccctctaggcgacttttagcaatcaacccatgctaaattgcctaaaaagaaaactcctagtgcatcaaatgaacatagcatttcatttaaaacttttgatgcatcttatgtgttaactaacaaatccggtaaggtagttgccaaatatgttgggggcaagcacaaggggtcaaagacttgtgtttgggtacccaaagttcttgtgtctaatgccaaaggacccaaaaccatttgggtacctaaagtcaagaactaaacttgttttgtaggtttatgcatccgggggctcaagttggattatcgacagcgggtgcacaaaccacatgacaggggagaagaagatgttctcctcctatgagaaaaaccaagatcctcaacgagctatcacattcggggatgaaaaccaaggtttggtcaaaggattgggtaaaattgctatatcacctgaccattccatttccaatgtttttcttgtagattccttatattacaatttgctttccgtttctcaattatgtcaaatgggctacaactgtctttttactgatataggtgtcactgtctttagaagaagtgatgattcaatagcatttaagggagtgttagagggtcagctatacttggtagattttgatagagctgaactcgacacttgcttaattgctaagactaagatgggttggctctggcaccgccgactagcccatgttgggatgaagaatcttcataagcttctaaagggagagcacattttaggattaacaaatgttcattttgagaaagacagggtttgtagcgcatgccaagcagggaagcaagttggtgctcatcatccacacaagaacatcatgacgactgacaggccacgagagctcctacacatggatctattcggaccgattgcttacataagcatcggcgggagtaagtactatctagttattgtggatgattattctcgcttcacttgggtgttctttttgcacgaaaaatcccatacccaagatacattaaagggattcttgagacgagctcaaaatgagttcggcttaaggatcaaaaagattagaagcgacaacgggacggagttcaagaactctcaaattgaaggcttccttgaggaggagggcatcaagcttgaattctcttctccctacacgccacaacaaaatggtgtagtggagaggaagaatagaactctattggatatggcaagaaccatgcttgatgagtacaagacttcggatcggttttgggccgaggcggtcaacaccgcctgctacgccatcaaccggttatatctacaccgaatcctcaagaagacatcatacgaacttctaaccggtaaaaaccccaatatttcatattttagagtctttggtagcaaatgctttattcttgttaaaagaggtagaaaatctaaatttgctcctaagactgtagaaggctttttactaggatatgactcaaacacaagggcataaagagtctttaacaagtcctctggacaagttgaagtttcttgtgacgttatgtttgatgagactaacggctctcaaatagagcaagttgatcttgatgagataggtgatgaagaggctccgtgcatcgcgctaaggaacatgtccataggggatgtgtgtcctaaggaaaccgaagagcctccaaatgcacaagatcaaccatcctcctccacgcaagcatctccaccaactcaaaatgagaatgaggctcaagttgataaaggagaagatcaaagagatgagtcacctcaagatgatggcaatgatcaatgggaagatacaaatgatcaagacaaggaggatgaagaaccaaggccgccacacccaagagtccaccaagcaatccaacgagatcaccccgtcgacaccatcctcggcgacatccataagggggtaaccactagatctcgtgttgcacatttttgtgagcattactcttttgtttcttctattgagccacacagggtagaggaagcactacaagattcggattgggtggtggcgatgcaagaggagctcaacaacttcactaggaatgaggtatggcatttggttccacgtcctaatcaaaatgttgtaggaaccaagtgggtgttccgcaacaagcaacatgagcatggtgtggtgacaaggaacaaagcccgacttgtggccaagggatactcccaagtcgaaggtttggatttcggtgaaacctatgcacccgtagctaggcttgagtcaattcgtatattattggcctatgctacttaccatggcttcacgctttaccaaatggacgtgaagagtgccttcctcaatggaccaatcaaggaataggtctatgttgagcaacctcccggctttgaagatagtgagtaccctaaccatgtctataagctctctaaggcgctttatgggctcaagcaagccccaagagcatggtatgaatgccttagagatttccttatcactaatggattcaaagtcggaaaagccgatcctacactcttcactaaaactcttgaaaatgtcttgtttgtatgccaaatttatgttgatgatattatatttgggtctactaatgagtgtacatgtgaagaatttagtaggatcatgacacaaaaattcgagatgtctatgatgggagagttgaagtacttcttaggatttcaagtgaagcaactccaagagggcaccttcctaagccaaacgaagtatactcaagatattctaagcaagtttgggatgaaggatgccaaacccatcaagacacccatgggaaccaatgggcatctcgacctcgacgatggaggtaaatccgtcgatcaaaaggtataccggtcgatgataggctctttgctatatttatgtgcatctcgaccggatattatgctttccgtatgcatgtgtgcaagattccaagccgaccctaaggaatctcaccttacggccgtaaaacgaatcttgagatatttagtttatactcctatgtttgggctttggtatcctaggtgatgcggacatcaacaccaacacgagcacatctacaccagcagcaccttctctagcccaggcgccaccccttccacctgggccagtgactcgggcccgtgcaagagaattgaactacatcatgttgttaaagaacgaaggcccggaagaatagacgaccaacccaattgcggcccataatggacgacctagggttggccgcccctaggggctgcgccccctctctatttattcaggagctgcgcctcctttattttcctagttttgttttacgttagccttagctactctcgaacacgcgcaaatctgcgctgtcttcgtgtattcagaactccaccctcgagtaatagattagattgctcgcctctttttcttgttcgttcttcgattgcgcacaggaaacgatcttcgtgatcaggccgatctcgcatcagcaaggtcggtaaccacagggagttggttcagcgattgcattggcgcctcgggcttgctcgtcgtagtcggatcgcaagggtcatcttccaccaaatcggaattatctctactcgccgaaagatcgggcacctcagctacatcaattggtatcagatttcctggttgatcggtgagtttatcgagcgttttttttcctacagtccacaaaacctcataaaaattcaggttagatcttatcccatgtaacaccccgaggtccacaaacaccccggaatgctactgaactacacttctgacatctatataaaattttggcagcatcccctttgcaaaattgcataaatgagggggggggacaacagtgtataaacatatatcatgacaaaaacataccaagtattattaatcggctagcaaagggaagttaaacatacgacatgaactgaattaaccagtgcgcacgactagcaaaaaaaataaacttcttttgacaacaagtttctaattaaatcatggctacgcctgggcagcgctattatgagagtgaaagtggacgtgctgctactcccctcattcccaacatgtatcaagtacctgcattgagtaatgcaagagtgagatgacacatctcagcaagtaaaataatatcaaactgtttaaccacataagaatattgttttaccaccacttgatttcacaaccttcttattacaaaggtgcagcacgtatacaacgtacaacactcctagctaccacacctcgcaggtagaaaccacaatagtaacatagtaatgtcactcttcatatatatatacctcatgagtgcaaatgtctgcaaatgcaaggatgacttctgccttcatacctctaaggatatgaagccgcatcgtacccctcctcgggcaacgtacgatgctaaaaatgtaccggtacagtcggaccataagatcacgacataacttcagaatgcaagatggatgatgcaatgtgcatgacatgcctacaacacttcatatagcgtgattcaaaaaaaaatacttcaactccatccatgatgggaatcaaccacatatatcattaccaaatcatgatcatccacaatattagacaattgagaattaatactttcgaacaaataaacttcatcatagaattcaatgattaacatattaaaacttatgcatactcgatgacagggaataggatgcaaaccaaacggtagcaaccaccactgtatttacttgcctttaccggaagtttgggcaaatccctaagtacgatccggaagtccaccacctgtttttgacacacaacttagtgcaccaatttcacataaccaggctcataaacgacgccgcacctacgcacaaactcaaaccccgccgcgggttacatctctccccacacccaccaaactgcagcggcgctgcttaataatttcataacttcaaaattatgacagcattggtaacaaacaaaaactccagaggcatctacataaaattccccacaagttttgtatacaatttataattaaattccaacatctaattagcccaaaacagttcacaagatgcaccctgtaatctgtttttttctcttttggacagcgacatacccggattcaaacagcgatatcttttaaaatataattccaattcaagcgcataagtactcattggaaagataagacaaagccatacatgattatcatactggttagcactaattaaccacgaaaaattcccagaaattgctaatactactgctgttcacccacctgaaaaatctgtttttttttacagcaacatacccggattcaaacagcgatatcttttaaaatataattccaaatcaagcacataagtactcattggaaagataagacaaagccctacatgattatcatactggttagcactaattaaccacgaaaaattcccagaaactgctaatactactgctgttcatccacctgaaaaatctgtttttttggacagcaacatacccggattcaaacaacgatatctcctaaattataactccgaatcgagcgcataagtactcgttggaaaggtatgacaaagctctacatgattatcccactgattcccactaattaccccacgaaaattcccagaaatccctagaactactgctgttcacccactcacaaaattcctggacagcacctctaccgattcgcaaagataaacacataatccaattgattgcagcacaaaaacaacaaaagttaatcacaaattcaccttaggttcttcccttcctccttccttcttcctccctccaaactccaattgagatcgcagccacacgacggagaaccacacgggagggctgcaccttggaggagggggagaaatgggggggcggctagggttttgggtggtgagggctgcaaagatttgaggaggaagaagatggaagaggggggggcgtccaagagaaaggggaggggaagggggcggctgcaacaacccaagggggaaaaaggggggcggcggctagggttagggaagggttagtgggccggattgcgattcgcggcccaactcgcttgcacgacagctcccgaccaaccactctactgctatactggtgaatgttttccataaattctaaatccccaaagcgcgacacccgaataagagaaaaaaacaaacaaaaagaataaccttcaacttctcttctttgcaaaccgggtatcacactctaccccccttaaaaagaattcgacctcgaattccgacgcttctatcggaacgacaaggaaagatcagcgacaacaaaaactcaccccataacgaaaagttcggggtacttctgccgcatcagctcctcgagcttcaaggattctaggatacgcagcagacgacactctagagtcaggtcttgctacatgggaatcgactctagctcgattattgatatggattccgcaaatactttctcaacatagagacatggaatacatggcgtactctgatcatagtctccgacaattgtatgtgctaagccaagctgccaactcgggctaagataatagacagtcctatataacccggacaaagttttcctgacaccaaatcaacattgacacatgcaagtacttcaatgaatatatataatgaaagcaatacatactgtgctccaatatcctaaaccaaacctatccaaacaagagtaacttcaaaagctcaatttaatgcttccatatttctagacatcagcacaacggttaattgttttgctcataaactcacaaagtatgcatccaacagtagtaaactaggactttatggaaagcttacaaagtccactatacccttggtattatcatcaccacaagattttacacttagaaaggacaaacaatgcgaaacgtaaattttgtccagacttggacagaattcaactactcacttaaaaaaatccataattggagtctcagtcatccaatttaggcgctcctagacttttttgaaagccagtaaaattgtctatatttcatttataaacatatcaggttaattcaatgcatatcaaggtcaaaaaacataagaaaggttttgctgtccaaatttggacagattcaaagattccacttaaaacagctgtagcttaacttataggtcaccaaaaagggtaatccaatatttgttggaaatcttaaggaaagtactccacttctttataatttataagaactgattcaaagtttaacttgggcaaacaaggtcagtttcaaaatctgtacagaatctggacagattccaagactagacttgagaaaatcataactcccaaactactagacctatggtcatgaaattttacacaagttctgaaaaagttggctacaacttttttatacaacacctctacagaaaacatggtttaattcattgaactagctgcataaccaaaactggtcatgtagtcccaaacagcaagcaatagatttattcaggttctatactcttctaagattaagcgttcatcgaaggactaataactttaggttcttcattacgagacactcagagccaacataaagatagaagccatatgctaaccttttaaatcattttaagccttatctcacatcatggaagcaagaatcgatttaagcatactacgcctgcccatatatccatccaagcatattctatacattatatcattccatc

SEQ ID NO: 729 - DNA, 716 bp, Zea mays
  source (0)...(0): Zea mays BAC clone full insert sequence contig bacm2.pk174.e4.fis1
  misc_feature (1)...(716): n = A,T,C or G
ccatcgcgcattagnnnnnnnnnnnnnnnnnnnnnnnnnnnnnnnnnnnnnnnnnnnnnnnnnnnnnnnnnnnnnnnnnnnnnnnnnnnnnnnnnnnnnnnccaaaactcatgtttggggtggtttcgcgcaatttcgttgtcgtacgtcaccctttcccaaaatgggagtttttgccaccggaagcaattcttcgtttttcgcaatgaacatgcccaatcctctactttagttccaaaactcatgtttggggtggtttcgtgctatatcgttgccgcacgtcacccattccgaaaacgggtgtcggggtgcatacaaagcacgaatttttgccacccgaaccatttcttcctttttcccaaccaaaatgccccatcccctactttaaggccaaaaacccagtttggggggggtttgccccatttcgttgccccccgtcacccctttccaaaacgggtgttggggggcaaacaaacaccaattttttccccccggaacatttttttcttttttcccacaaacaagccccaacccccaactttagttcccaacttcctttttgggggggtttccccaatttacttgccccccttccccccttccacaaacgggttttggggtggctaaaaaacacaagtttttttcccccgaaacaattctttcttttttgcaaaaaaaagccccaatcccgctatttgggccaaaccccgatttgg

SEQ ID NO: 730 - DNA, 804 bp, Zea mays
  source (0)...(0): Zea mays BAC clone full insert sequence contig bacm2.pk174.e4.fis2
tgggtgacgtgcgacaacgaaattatgcgaaaccaccccaaacatgagttttggacctaaagtagtggattgggcatgttcgttacgaaaaacgaagaaatggttccggtggcaaaaactcgtgctttgtatgcaccccgacaaccgttttcagaatgggtaacgtgcggcaacaaaattgtgcgaaaccacccccaacatgagttttgtacctaaagtagtggattgggcatgttcgttgcgaaaaacgaagaaatggttccggtggcaaaaactcgtgctttgtatgcaccccgacacccgttttcggaatgggtgacgtgcgacaacaaaattgcgcgaaaccaccccaaacatgagttttgtacctaaagtagtggattgggcatgttcgttgcaaaaaacgaaaaaatggttccggtggcaaaaactcgtggttttatgccccccacaccccttttcggaaagagtgaagtgcggcaacaaaattgcgcgaaacaccccagacatgagttttggacctaaagtagtgcattgggcaggttctttgcgacaaacaaaaaaatggtgccggtggcgaaaactcgtgcttttatgcaccccacaccccttttctgaatggatgacatgtgacaaccaaattgcgcgaaacaacccccaacatgcgttttgtaccaacaatacatggatagggccggttcgttgcgaaaaacaaaaaatggttctgggtggcgaaaacacaggctttggtttgcccaccccacaccttttttcgaaaggggggagggccacaacaaatttctg

SEQ ID NO: 731 - DNA, 801 bp, Zea mays
  source (0)...(0): Zea mays BAC clone full insert sequence contig bacm2.pk174.e4.fis3
attgctgatttgttctttcgtgaaattgttcgcttgcatggtgtgcccaacacaatcgttttttatcgtgatgctaaatttcttagtcatttttggaggactttgtgggcaaaattggggactaagcttttattttctactacatgtcatcctcaaactgatggtcaaactgaagttgtgaatagaactttgtctactatgttaagggcagttctaaagaagaatattaagatgtgggaggactgtttgcctcatgttgaatttgcttataatcgatcattgcattctactacaaagatgtgcccatttcagattgtatatggtttgttgcctcgtgctcctattgatttaatgcctttgccatcttctgaaaaactaaattttgatgctactaggcgtgctgaattgatgttaaaactgcatgaaactactaaagaaaacatagagcgtatgaatgctagatataagtttgctagtgataaaggtagaaaggaaataaattttgaacctggagatttagtttggttgcatttgagaaaggaaaggtttcctgaattgcgaaaatctaagttgttgcctcgagccgatggaccgtttaaagtgctagagaaaattaacgacaatgcatataggctagatctgcctgcagactttggggttagccccacatttaacattgcagatttaaagccctacttgggagaggaagttgagcttgagtcgaggacgacacaaatgcaagaaggggagaatgatgaagacatccacactactgatacatctatgccaatacaagtacca

SEQ ID NO: 732 - DNA, 1475 bp, Zea mays
  source (0)...(0): Zea mays BAC clone full insert sequence contig bacm2.pk174.e4.fis4
ctgatacatctatgccaatacaagtaccaatttctggtcccattactcgcgctcgtgctcgtcaactcaaccatcaggtgattacactcttgagttcatgtccatcatatttagaccatggagacccgtgcactcttgttttgcttaggaaccagggagaagaccgaaagggaaaaggatttgaacatgctggattcagactgcagaagaacaccaactagtgatggtcaccacggtcagatgcgggcacggattggaatgttcaagcacaacatggaaagcttatcaagtctactttcatatggatccggaattatagtcatatctgttctgaggccgccgtaatcattgttttcttaccgagacatttcctgccttttctgcccatggtgctgcgtcaccctattttggcccaatgggtcgtgtatcaagttaggtccattagggacgcatcctagggttgcagcacgaccccaatacccttatggtcgtcctcccatgtttataaaccccctagccaccaccaagaacagcgggttttgtttagatcaagtttagctctcgctacttgcttgtaagcgcgcgtgctagtcagccgcccgtcttcttgtcttcataaccccaccatattggggtttgattttgaaacctacatttagatctggtaattcagtacttgttctacttgttcttgctagttcttcgattgcttgcaggacgagtgccctagtggccagggtgtcacgctccacaagatcgtgacagccataggaggtggtgtatcggttgctaaggcgcagcgtcttgggaaggctgtagtcgggccgtgaacgtcgtcttctccaccaatcgagttattccacaccctctcatcgaaagatcgggcaatcacccaacgggtgcacatcacccgttttcggaatgggtgacgtgcggcaatgatatagcgcgaaacaaccccaaacatgagttttggacttaaagtagtggattgggcatattcgttgcgaaaaacgaagaaatggttccggtgtaaaaaactagtgctttgtatgcacccgtacccgttttcggaatgtgtgacgtcccacaacgaaattgcgcgaaaccaccccaaatatgagtttttacctaaagtagtggattgggcatgttcgttgggaaaaacgaagagttggttccggtggcgaaaactcgtgctttgtatgcaccccgacacccgttttgggaatgggtgacgtgcgacaacgaaattgcgcgaaaccaacccaaacatgagttttggacctaaagtagtggattgggcatgttcgttgcgaaaaacgaagaaatggttcctgtggcaaaaagtcgtgctttgtaccgacacccgttttgggaatgggtgacgtatggcctgtctcttatacacatctcaaccatcatcgatgaattttctcgggtgttctcgcatattggctcgaattcgagatcga

SEQ ID NO: 733 - DNA, 1677 bp, Zea mays
  source (0)...(0): Zea mays BAC clone full insert sequence contig bacm2.pk174.e4.fis5
tccaaaaacgggtgtcggggtgcatacaaagcacgagtttttgccaccggaactgatgaagctaaggtgcccgatctttcggcgagtagagataattccgatttgtcggaagatgacccttgcgatccgactacgacgagcaagcccgaggcgccaatgcaatcgctgaaccaactccctgtggttaccgaccttgctgatgcgagatcggcctgatcacgaagatcgtttcctgtgcgcaatcgaagaacgaacaagaacaagatgcgagcaatctaatctattactcgagggtggagttctgaatacacgaagacagcgcagatttgcgcgtgttcgagagtagctaaggctaacgtaaaacaaaactcaggaaataaaggaggcacagctcctgaataaatagagagggggcgcagcccctaggggcggccaaccctaggtcgtccattatgggccgcaattgggctggtcgtctattcttccgggccttcgtactttaacaacatgatgtagttcaattctcttgcacgggcccgagtcactggcccaggtggaaggggtggcgcctgggctggagaaggtgctgctggtgtagatgtgctcgtgttggtgttgatgtccgcatcatcctccccttcttgaactgaagtcgtcctcgacggcaactcctcatcttctcccgcatacggtttcaaatctgcaacattaaaactagtggaaacaccaaactccgcaggtaggtcgagggtataagcattatcattaatcttggttagtatcttaaaaggaccagcagcacgaggcatcaatttagaacgacgcaaagtaggaaaacgatcctttctcaaatgcaaccaaaccatatcaccaggttcaaaagtaacatgttttcttcctttactaccagcaacctgattttttgtattagtagcagcaatgttctgtttcgtttgttcatgtatggtaatcatttgttcaacatgtgcagaagcatctacatgtggggcgttcgcagcattaagtgaaatcaaatcaataggtgccctaggaatgtaaccataaacaatctggaaagggcacatctttgtagaagaatgcgtggcatgattgtaagcaaattcaacatgaggcaagcaatcctcccaacgtcgcaaattcttgtctaaaacagccctaagcatggtagataaagttctatttactacctcagtttgtccatcagtttgagggtgacaagtagtgctaaacaacaatttagttcccaatttattccaaagagatctccaaaaatggcttagaaacttagcatcgcgatcagagactattgtttttggaataccatgtaaacgaataatttctctaaagaacaattcagcaacaatgctagcatcatcagttttatgacaaggtataaagtgagccattttagagaatctatcaacaaccacaaaaatactatccctccccttcttagttctaggcaagcccaaaacaaagtccatagagatatcaagccaaggagaagaagggacaggcaaaggcatatacaaaccatggttgttcaaccgtgacttacctttctgacaagtagtgcagcgtgcaacaacgcgctccacatcagcgcgcatccgagccaaaagaagtgggcagccaacacctcatgtgtcttgtaga

SEQ ID NO: 734 - DNA, 2648 bp, Zea mays
  source (0)...(0): Zea mays BAC clone full insert sequence contig bacm2.pk174.e4.fis6
gtgtgtagattgtcgagcaattaataacattaccatcagatatcgtcatcctatccctaggttagatgatatgctggatgaacttagtggctcaatgattttctctagaattgacttacgtagtggatatcaccaaattcgcatgaagctaggggatgaatggaaaacggcgtttaaaaccaagtttggtttgtatgagtggttagtcatgccttttggtctcactaatgcacctagtactttcatgagattaatgaatgaggttttacgtgctttaattggaagatttgtggtcgtctacttcgatgacatcttgatctatagcaaatgtctagtagaccatcttgatcatctacgtgttgttttcaatgctttacgtgaagcacgcttatttggtaaccttgacaagtgcacattttgcacagaccgtgtctcttttcttggctatgttgtgacaccgcagggaattgaagttgatcaggctaaggtggaggccatacatagctggccagtccctaccacggtcacgcaagtccgaagctttctcgggcttgcggggttctatcgtcgatttgtgaaagatttcagcaccatcgcagggccattgcacgagcttactaagaaaggtgctccattttcttggggcaaggcgcaagaggttgcatttgaaacattgaaggataggttaactcatacaccccttctccaattacctgatttcagtaagacttttgaattggaatgtgatgctagtggtattggtttgggtggtgtcttgttgcaagaagggaagcctgttgcttattttagtgagaaactgaatggacccagtctgaactattccacttatgataaagaattatatgccttagttcgaactttggaaacatggcaacactacttatggcctaaagaatttgttatacattctgatcatgaatctttaaagcatctaaggagccaaacaaatctgaaccgtaggcatgccaagtgggtcgaatttattgaatcttttccctatgtcatcaaacataagaaaggaaaagataatgtcattgcagatgccttgtctcgccgttataccatgctgtctcaacttgattttaagatttttggcttggaaacaattaaacaacaatatgttttcgatgctgatttcaaagatgtgctattacattgtaaagaaggaaggacatggaacaaatttgttctcactgatggctttgtgtttcgggctaacaaattatgcattccagctggttccgtgcgtatattattattacaggaagcacatggcggtgggttgatgggacactttggtgtgaagaagacagaagacatcctggccagccatttcttttggccgaagatgagaagagacgtggagcgatttgttgctcgctgcactacatgtcaaaaagctaagtctcgccttaattcacatggtttatacatgcctctcccagttcctagtgcaccatgggaggatatttctatggactttgttttaggactacctagaacaaagaaggggagggatagtatttttgttgttgtggacagattttcaaaaatggcacactttataccatgtcacaaaactgatgatgctacccatgttgctgatttgttctttcgtgaagttgttcgtttgcatggggttccaaacactattgtgtccgatcgggataccaaatttcttagtcatttttggaaaacgttatgggctaagttgggaactaaattgctcttttctactacttgtcaccctcaaaccgatggacaaaccgaagtcgtaaaccgtagtttatctaccatgcttagggctgttctgaaacataacatcaaattgtgggaagaatgtttgcctcacattgaattttcttataatcgttctcagcattctacaactaaactatgcccttttaaaattgtgtatggttttgtccctcgtgctcctattgatcttatcgccatcccacattctgaaataatgaattttgatgcttctcgtcgtgctgaactgattataaagctgcatgaacaaactaaagcaaatattaaagccatgaatgctaagtatgaagaagcaggtagcaagggtagaaagcatattacctttgaacctggtgatttagtatgggtgcatttaaggaaagatagattccctgatatgcgcaaatctaaattacaaccaagagctgctggacccttcaaagtgcttcacaaaattaatgataatgcatataaagttcagttgcctgcagattttggggtcagttcctcttttaacattgcagatttaacaccatacttgggagagaatgacacgtttgagtcgaggacgactttgttgcaagaaggggaggatgatgaggacatcactatcattgatacaaccataccagtgaccacttcaccattcgtagctaatcaaggaccaatgacacgagcccgtgcacgtaaacttaattatcaggtgaactcgttctttgctattgaagctaattcttctttaaatgaggtactaaagccttgcgatgactttattatgctcaggtgtttgggaggtgaaccgtcttggactggagaaaggcaacaaggcaataaaggctgctgcacccgagaggatttcgtaacagcaccaa

SEQ ID NO: 735 - DNA, 3458 bp, Zea mays
  source (0)...(0): Zea mays BAC clone full insert sequence contig bacm2.pk174.e4.fis7
gagtgcagcctacccaaaactccacatatttctacgacgagaaggtttctgtttctccaggcaatcgctcatccaatctttcaccggttccacctgttggttgcagttcaccactgtggcttggtaagaacggataagaacttgataacagcactagtgtgagcgccttgtgagcagtacacccctgtttttgtcgttggtttttttttctccttttggtgttttggtgtttgcgctaactatggcaggagcacacgacatggtggatgcccagttgcaggaagtacggggacaagttgatggacttgctgctgacattaggacgatgcatgaacggcttgattcaacgatcacttcgacgaccgagcgtttcaaccaacttgaccttgctcaaacggcgactcgcaccacactcgacaccatcctggcacgccttgatgcattgaccacaaagatggagcaggaatacggcggtgacactgagctggacgatggagatcgccgtggtcgtgcacgtcgtgtggttcgtcatccccctaatgacttattttctaagattaaatttaaaattccatcttttaatggtaaatatgatcctgctgcatatcttgattgggaattggaggtagaacagaaattttcatgccatgatattcctgctaatagccaagtgaaggctgccattagtgaatttactgattttgctttaatttggtggcgtgagtataaacaaaaacttcccattaacagtgtcactacttggacccaattaaaaactgccatgcgccacagatttgttccttcctattatgctcgtgatttgcttaacaaaatgcagcgttttcaacaaggttcactatctgttgaggaatattaccaggagttacaaaagggtatgcttcgttgtggtttggttgagtcagatgacgctgctatggcgcgttttcgtgggggtttgaacagggaaattcaggatatacttgattataaggattattttgatataaccacattgtttgaatatgcttgcaaagctgaacgtgaagtgcagggacgacgatcaaagacatatactaactcttttgcaggccggggtccaacacacaactcaactccttccagccctgcaccttctacgcctagcactacatcgcgcacagggacgaccaagccagtggcgctccctgccaaaggcgccgcttcttccacaggacgtacacgagatattcagtgccatcgttgcagagggtttgggcacatgattcgggactgcccaaacaagcgtaccttgcttatacgtgacaatggtgagtactcttcagccagtgattctgaggaaactagtcatgctatgattgccactaaccatgcagaaaatgaggaagtccacgttgatcccatcgacgccgataggtatgagagtcttgttgtgcagcgtgttctcagcacacaggttgcccaggccgaaaaaaatcagcgacacactctattccataccaagggcgtcgtgcacgaacggtcgattcgcatcatcatcgatagtggcagctgcaacaatttggcaagtacagcgttggtagagaaattatccttgcccactcgcacacatccacatccgtatcacattcaatggcttaatgatggtggtaaaataaaggtaacacgttcggtacgtgtccccttttcgctgggttcttattctgattatgctgattgcgatgttattcctatggaagcatgctctttgttattaggtcgaccttggcaatatgatactgatactttacatcatggtcgttcaaatcattattctttcatgtttaaaggccagaaaataattatacatccaatgacccctgaccaaattttgaaagatgatcttactagggctgctaaaactgcacaacaagtcaaatcgacatcagccgcacctattaaatctgaaatcaagttgcactctcctgttttacttgctacacgtgctgattttgatgatctccatgaagctcatatgccctgttatgcacttgtatgctcgcgaatgcttgttccgcttgatgatgcaccgtctttggatataccccctgctgttgttaaccttttgcaggagtatgctgatgtttatcctacagacttaccaccgggtcttcctcccctccgtggcattgagcatcagatcgatctcatccccggcgcttctcttcctaaccgcgccccgtaccgtacaaatccagatgagacgaaggagatccagcgccaggtgcagacactgcttgataagggttacattcgtgagtctcttagcccttgctcggttcctgttttactcgtcccaaagaaagatgggtcatggcgtatgtgcgtagattgtcgtgctattaataacatcacagttcgttatcgatatcctattccacgccttgatgatatgctagatgagcttagtggtgccgttattttttctaaggttgatttgcgtagcggttaccatcagattagaatgaaactcggtgatgaatggaaaacggcttttaaaacgaaatttggtttatatgaatggttggttatgccatttggattgactaatgctcccagcacctttatgcgtttaatgaacgaagttctacgggccttcataggtttgtttgttgttgtttatttcgatgatatccttatttacagcaagtctatagaggagcatttagaacatttgcgtgctgtttttgacgctttgcgtgctgctcgcttgtttggtaacatggaaaagtgcacattttgcacgcaacgtgtctcgtttcttggttatgtggttactccgcagggcattgaggtggatagcagcaagattgctgccattcgggagtggcctacaccgacgacggtcacacaaattcggagctttcttggacttgccggtttctaccgcagatttgttcgtgattttagctccattgcagcgcctctacatgagcttacaaagaaagatgtgtcgtttgcttggagtgattcgcaggaggtagcgttcagcactttgaaagataagttaacccaagctcccctattgcaattgcctgattttaataaagtgtttgagcttgaatgcgatgctagcggtattgggctaggtgctgttttgttacaagaaggaaaaccagttgcttattttagtgaaaaattaagcggtgctagcctgaaatattctacttatgataaggagctttacgctttagtgcgcactttgcatacatggcagcactatctttggcatcgtgagtttataatccattctgatcatgaggctttaaaacatattcgtacccaaacaaatctgaaccgtcgtcatgctaaatgggtaaaattcattgagtcctttccttacattattaaacaacgaacatgcccaatccactactataggtccaaaactcatgcttggggtggtttcacgcaaatttatg

SEQ ID NO: 736 - DNA, 3565 bp, Zea mays
  source (0)...(0): Zea mays BAC clone full insert sequence contig bacm2.pk174.e4.fis8
gaagcccctgggatgaggtcaatctgatgctcaattcctcttatcggtggcaggccaggtggcacttcgtttggaaatacatcagcatattcctgcaaaagattagtgacagtagaaggcaaagtagatggtatgttgtgaagtgagaacaaagcatccttgcaaataaatacatagcagattgaagcaacatcatttaattcaagcaaatcagatttggaagcaagaaaacaagcacttttcagttgtatttctgtcttcctcacttgagtagatttagaattgtcactcttatgttgtaccaactcctttgcagcacctagatttttattatgaacagatttatttttctctttgcaagctctagcaacttcatccttcaaaatagcatcgggggacatggggtgcaatacaagcttcttctcattatgcataaaagagtagtgatttgttttaccatgatgcacggtgtccttatcaaattgccatggtctaccaaataacatagagcaagcttgcataggtaccacatcacaatcaatataatcatggtatgaaccaattgtaaattccacacggaccatacgtgttaccttaagcttaccactgtcgttgaaccattggatgtagtaggggtgtggatgtggaagcgttttcagccgaagcttctctaccatggtggtgcttgctaagttgttgcagcttcctccatcaattataatacgacaagatcgttccaaaactacacatttagtttggaacaaattgtgtcgctggttttgttcagctttaataatttaggcactcaagacacgtcttacaacgaggctctcatagtgttcagcatgttcagccccaatatgctcttcatcatcatgctccttttcagcatcttgggcagcaagcatggcatatgtatcattatctaaatcgctggctgatgagtactcaccattttctcttataattagtacacgcttactttggcagtcccttcgaatgtgcccaaatcctttgcattggaggcattggatgtcctttgttcttcccgtggaagcaatagaagaatatttggctacagcttgggaggatcctttccctgtctcaatagcacgagaaggtgctgatttcgatggtgttgtggatgatctattggaagcatctccctgaaacacatggttagagctagcagcactagtgcggggctgccaagatgtattgcgacctgcataagtgttagttctcaagcatcgtccctggacttctctttcagccttacaagcaagatgaaataagcgagtaacattagtgtattccttgtaagctaatatatcctgaatttctcttgtcaaaccacccatgaacctagccattgcagcttcttcattttctacgagaccacacctcaacatgcctatttgtaattgttgataatactcttcaacagatttgttgccttgtctaagctgttgtaatttatgtaataaatcacgagcatgataggaaggaacaaaacgactacgcatgattctttttaaagcattccaagtttgtggtatggtagctagatgtgtagtttggtactcatgccaccaaatagaagcaaaatcagtgaattcactcgtagcagctctaacctttttatcatcagaaaaatcatagcatgcaaatttttgatctaccgacaattcccatgttagatatgcatcaggatcatattttccatcaaacgatggtatggagaatttaattcttcctagagaatcatcattttcatgtacctcacgtcgtggaggtcgaccacccaagccatggcgatcacgtcgttggtgtcgtcggtgcctaatagatcggtcatcacgctcggtgtctgctgaatactccgtagcatcatctcttgcggtaccagcaatggaaccatagccatcatcatcaccttgttgcctactttcacgcccaacttggtccatcctatctaagcgctcaataattgctgcaagagaggtgttagtagcagcaactgtttgttccaaagtggtcaatgtgttgttggtaacaatttgtgctgtttctaattgaccaatgcgctcattggtgacttgaacatcttcattgagggcatctgtgtgcaaccttacttgacgttcgaaatgttgaatgatgcccactgttcgtggagaatgtggaggtcgcgcatttgcatcctctgccatggttagtgcaaaagagatacaaaaacaagtaatgcagcctagtagttgctatgatgtggatggataaacactgcctcactagcaagaaatcaagctcttacaagttctcaccacgcaaagcaagtggcgctggcaaacagcaagaacaacaacagtggctgctagcacaacctggtggtgttgtagaaaaatttgtggatttataggtggctgctaaaacaatagttccaaggaatagctagtaccacattagccacaacaagttgaataaacgttccacaatggtgttgtgctggtcctagtccaaaccgtaatagagacgcgagccgttacacaaatgatatcaccaaatactcaaaacagcacgctgacttagaaaattgtcaaacggtggcacataaactgtctttgttttgttgcacatggaattttatctaccaatattcttactgcgattttttttctcttttttgtacgtgcttttttttatcagcgcgactttttttgtgcacttgccttttccttttccttgtttttttgatctacagctagcgaacagctagagaactaaaaatggtgatctaaacaaggtggcacaaatgcagcaaccatgaattcaacaagtcgaaaactaagtagtaaagcaaaggctcaaaatgtttttaggtgattttctgctctaaatatatctttggcaaaagtggactgtaggtaaataaaataaggaagatggagatctctcaccgagcaacctgaaatttgataccacttgataaacccaacgggtagaagggtgcccgatctttcgatgagagatgatagaggtggaaaacttgttggagaacgacgttggctgcccgactaccacaaccaagatggtgtggcgccttgagcgacaggtacaccgtctcctgataactacgatttggggtggaggtcgacgttgtgctatccgactacaacaaccacaagggtgttgcgccttagcgatagttacaccggctcctgttgttgctgctcttgccgtgccaagaacagccttgaacctgcaagcaatcgagaacaagcaagaacaagataaaacgcagacgctcacggatctgatagagttggggttctgtttcaagtatccgggtggtctagccgacacacgcgtttacaaggaagtagcaaaggctaaacttacatcaaacaaaacccaagttctttggtggctgctagttgcttaaatagagaaataggaagaaggaattctggtggagtcatgaagttccctcggcagtttctggacgcctcgggtgtagtctcccattaattcttgatccaccagcaagtagacgaagggagctttc

SEQ ID NO: 737 - DNA, 3707 bp, Zea mays
  source (0)...(0): Zea mays BAC clone full insert sequence contig bacm2.pk174.e4.fis9
gacggccagtgccaagctcagatcagcttgcatgcctgcagtgcagcgtgacccggtcgtgcccctctctagagataatgagcattgcatgtctaagttataaaaaattaccacatattttttttgtcacacttgtttgaagtgcagtttatctatctttatacatatatttaaactttactctacgaataatataatctatagtactacaataatatcagtgttttagagaatcatataaatgaacagttagacatggtctaaaggacaattgagtattttgacaacaggactctacagttttatctttttagtgtgcatgtgttctcctttttttttgcaaatagcttcacctatataatacttcatccattttattagtacatccatttagggtttagggttaatggtttttatagactaatttttttagtacatctattttattctattttagcctctaaattaagaaaactaaaactctattttagtttttttatttaataatttagatataaaatagaataaaataaagtgactaaaaattaaacaaataccctttaagaaattaaaaaaactaaggaaacatttttcttgtttcgagtagataatgccagcctgttaaacgccgtcgacgagtctaacggacaccaaccagcgaaccagcagcgtcgcgtcgggccaagcgaagcagacggcacggcatctctgtcgctgcctctggacccctctcgagagttccgctccaccgttggacttgctccgctgtcggcatccagaaattgcgtggcggagcggcagacgtgagccggcacggcaggcggcctcctcctcctctcacggcaccggcagctacgggggattcctttcccaccgctccttcgctttcccttcctcgcccgccgtaataaatagacaccccctccacaccctctttccccaacctcgtgttgttcggagcgcacacacacacaaccagatctcccccaaatccacccgtcggcacctccgcttcaaggtacgccgctcgtcctccccccccccccctctctaccttctctagatcggcgttccggtccatggttagggcccggtagttctacttctgttcatgtttgtgttaaatccctgtttgtgttagatccgtgctgctagcgttcgtacacggatgcgacctgtacgtcagacacgttctgattgctaacttgccagtgtttctctttggggaatcctgggatggctctagccgttccgcagacgggatcgatttcatgattttttttgtttcgttgcatagggtttggtttgcccttttcctttatttcaatatatgccgtgcacttgtttgtcgggtcatcttttcatgcttttttttgtcttggttgtgatgatgtggtctggttgggcggtcgttctagatcggagtagaattctgtttcaaactacctggtggatttattaattttggatctgtatgtgtgtgccatacatattcatagttacgaattgaagatgatggatggaaatatcgatctaggataggtatacatgttgatgcgggttttactgatgcatatacagagatgctttttgttcgcttggttgtgatgatgtggtgtggttgggcggtcgttcattcgttctagatcggagtagaatactgtttcaaactacctggtgtatttattaattttggaactgtatgtgtgtgtcatacatcttcatagttacgagtttaagatggatggaaatatcgatctaggataggtatacatgttgatgtgggttttactgatgcatatacatgatggcatatgcagcatctattcatatgctctaaccttgagtacctatctattataataaacaagtatgttttataattattttgatcttgatatacttggatgatggcatatgcagcagctatatgtggatttttttagccctgccttcatacgctatttatttgcttggtactgtttcttttgtcgatgctcaccctgttgtttggtgttacttctgcaggtcgaccgccggggatccacacgacaccatgtcccccgagcgccgccccgtcgagatccgcccggccaccgccgccgacatggccgccgtgtgcgacatcgtgaaccactacatcgagacctccaccgtgaacttccgcaccgagccgcagaccccgcaggagtggatcgacgacctggagcgcctccaggaccgctacccgtggctcgtggccgaggtggagggcgtggtggccggcatcgcctacgccggcccgtggaaggcccgcaacgcctacgactggaccgtggagtccaccgtgtacgtgtcccaccgccaccagcgcctcggcctcggctccaccctctacacccacctcctcaagagcatggaggcccagggcttcaagtccgtggtggccgtgatcggcctcccgaacgacccgtccgtgcgcctccacgaggccctcggctacaccgcccgcggcaccctccgcgccgccggctacaagcacggcggctggcacgacgtcggcttctggcagcgcgacttcgagctgccggccccgccgcgcccggtgcgcccggtgacgcagatggatccaccggtcgccaccatggcctcctccgagaacgtcatcaccgagttcatgcgcttcaaggtgcgcatggagggcaccgtgaacggccacgagttcgagatcgagggcgagggcgagggccgcccctacgagggccacaacaccgtgaagctgaaggtgaccaagggcggccccctgcccttcgcctgggacatcctgtccccccagttccagtacggctccaaggtgtacgtgaagcaccccgccgacatccccgactacaagaagctgtccttccccgagggcttcaagtgggagcgcgtgatgaacttcgaggacggcggcgtggcgaccgtgacccaggactcctccctgcaggacggctgcttcatctacaaggtgaagttcatcggcgtgaacttcccctccgacggccccgtgatgcagaagaagaccatgggctgggaggcctccaccgagcgcctgtacccccgcgacggcgtgctgaagggcgagacccacaaggccctgaagctgaaggacggcggccactacctggtggagttcaagtccatctacatggccaagaagcccgtgcagctgcccggctactactacgtggacgccaagctggacatcacctcccacaacgaggactacaccatcgtggagcagtacgagcgcaccgagggccgccaccacctgttcctgtagcggccggccgcaacctagacttgtccatcttctggattggccaacttaattaatgtatgaaataaaaggatgcacacatagtgacatgctaatcactataatgtgggcatcaaagttgtgtgttatgtgtaattactagtctgcagcatttggctaccttaagagagtcatagttatagctcgagcggccagcttgatatcgaattcgcccttagggtttagggtttagggtttagggtttagggtttagggtttagggtttagggtttagggtttagggtttagggtttagggtttagggtttagggtttagggtttagggtttagggtttagggtttagggtttagggtttagggtttagggtttagggtttagggtttagggtttagggtttagggtttaggg

SEQ ID NO: 738 - DNA, 3981 bp, Zea mays
  source (0)...(0): Zea mays BAC clone full insert sequence contig bacm2.pk174.e4.fis10
gaatcattatcccacaaatcttcactatcacaagtgtcagcaatcaattcttcttgtgatgatggaaaaacaacagctggtttcattattttgtgttcttgatcagcatgtagagcagatgcaaaagaggaactatggctcacatgttcagtgcatgtataattgtataatagaatctcattttcagctttacatgcaagcaaaaacaagtgagaaatgtgtttgtatgcttcatgcatgactatagtctgaatttcagaattgagtcctttcatgaacctagtcatgacatcttccatgcattcatctaaacgagcaaacatggtacaaattttaaaatcataataataatctttcacagtcctagcaccctgctttaaggtgtctaatttagaaagcaaatgatcagcatagtatgcaggaatgaatgcatctctaaaatgaagtttgaagtcttcccaagattgtggaactttgttgtgcctacaaatgtatttccattccatcaatgcgtgctcagttaacaaattagaggcaatataaatcttttgtttttgagatagatcatgcttatcaaattctttatctacctttagctcccaatcaatgtatgcatgaggatcgaatttaccggcatataaaggcaagtgttgaatgatgcctccaatataacgttcggttgggtcaaaaatgtccatatcacctgccatgtttagtaaaacaagaaacaataaaaaatatctttgattctataaactactaggaatcattgttgtaatctctcactctcaaactggttaaacaagttcttacaagttctcaccacgcaaagcaggaggcgctggcaaacagcacgaacaacaacaacagtggctgctagcacaacctggtggtgttgtagaaaattttgtggatttataggtggctgttaaaacaatagttccaaggaatagctagtaccacgttaaccacaacaagttgaataaacgttccacaatggtgttgtgctggtcctagtccaaaccgtaatagagacgcgagccgttacacaaatagtatcaccaaaagctgagaacagcaatctgatttctgaaactataaaaaaaagacacacaaactgccttttgttttattgcacttacaaattttatctaccaaaattcagaactggtttttttctctctcttttttttgcacgtgtctttttttattttgctgattagtgcggctttttttatgcactcgccttttgctttctcttctttttggttgaattgcagcaagaggtctaaactggtgattgaaacaaggtggcgcgaactcgaaactctagcggtaagaaaactttagaccagcaactcgacccaaatgcagcaaccgtgaattcaacaagtcgaaaactaagtagtaaagcaaaggctcaaactgtttttaggtgaatttatgatctaaatatatctttgggcaaaagtggactgtaggtaaataaaacaaggaagattgagttctctcaccgagcaacctggctttgataccacttgataaacccaacgggtagaagggtgcccgatctttcgatgagagatgatggaggtggaaaacttgttggagaacgacgttggctgcccgactaccacaaccaagatggtgtggcgccttgagcgacaggtacaccgtctcctggtaactacgatttggggtggaggtcgacgttgtgctatccgactacaacaaccacaagggtgctgcaccttagcgatagttacaccggctcctgttgttgctgctcttgtcgtgccaagaacaaccttgaacctgcaagcaatcgagaacaagcaagaacaagataaaaagcagacgctcacggatctgatagagttggggttctgtttcaagtatccgggtggtctagccgacacacgcgtttacaaggaagtagcaaaggctaaacttacatcaaacaaaaacccaagttctttggtggctgctagttgcttaaatagaggaatagaaaggagttctaatggagaacgaaactctctcggcagtttctggatgcctcgtttgggttctgtcattgattcttgatgcacatgaaagtagacgaagagagctttccaacaagtagttatttgcactaaacaaccttgggagtggaaagttatgctccatttaatttggtgcatgctgcagttacgaaattgacttgggtagagcaggagttcactcggcagtttctggacgcttagtgtctctcgttgattcttgatccactaaaaagtagatgaagagaactttccaacaagtgcttatttgcattaaacaaccttgggagctgaaagatatgccctcttaaacttgcacttgttgtagtttcgaaatcccctcaagtggagcagcttttattgccttgttgccttctcaaattctagatggttcacctcccaaacaccttagaataataaagtaatcacaaggtatcagtacctcatttaaggaatgattagcttcaacaacaaggaacgagttcacctgataattaaatttacgtgcacggactcgtttcactggtccatgattaaatggtgaaggaggtcgctggtgtggtgtattgatgacagtgatgtcctcatcacccgttttcggaatgggtgacgtgcagcaatgaaattgcgcgaaaccaccccaaacatgagttttggacctaaagttgtggattgggcatactcgttgcaaaaaacgaagaaacggttccggtggaaaaaactcgtgctttgtatgcaccccgacacccatttttggaatggcggacgtgcggcaacgaaattgcgcgaaaccacaccaaacataagttttggacctaatgtagtggattgggcatgttcgttgcgaaaaacgaagaattggttctggaggcaaaaactcgtgctttgtattcaccccgacacccgttttcggaatgggtgacgtgcggcaatgatatagcgtgaaacaaccccaaacatgagttttggacctaaagtagaggattgggcatgttcgttgcgaaaaacgaagaaatggttccggtggcaaaaactcgtgctttgtatgcaccccgacacccgttttggaaatgggtgacgtacaacaacaaaattgcgtgaaaccaccccacacatgagttttggacctaaagtagtggattgggcatgttcgttgcgtatagcaaagaaatggttccggtggcaaaaactcatgctttgtatgcacccgacacctgttttcggaatgggttacgtgcggcaacgaaatttcgcgaaaccatcccaaacatgagttttggacctaaagtagtggattgggcatgttcgttgcgagaaacgaagaaatggttccggtggcgaaaactcgtgctttgtatgcacacgacacccgttttcggaatgggtgacatgcggcaacgaaattgcgcgaaaccaccccaaacttgagttttggacctaaagtagtggattgggcatgttcgttgcaaaaaacgaagaaatgattccggtggcgaaaactcgtgctttgtatgcaccccgacacccgttttcggaatgggtgacgtgcggcaacgaaattgcgcgaaaccaccccaaacatgagttttggacctaaagtagtggattgggcatgttcgttgcgaaaagcgaaaaatgcttccggtggcaaaaactcgtgctttgtatgcaccccgacaccctttttcggaataggtgacgtgtggcaacgatataacgcgaaacaaccccaaacatgagttttggacctaaagtagaggattgggaatgttcgttgcgaaaaacgaagaattggttccggtagcaaaaactcgtgctttgtatgcaccccgacacccgttttgggaatgggagacgtacggcaacgaaattgcgcgaaaccaccccaaacatgagttttggacctaaagtagtggattgggcatgttcgttgcgg

SEQ ID NO: 739 - DNA, 8036 bp, Zea mays
  source (0)...(0): Zea mays BAC clone full insert sequence contig bacm2.pk174.e4.fis11
  misc_feature (1)...(8036): n = A,T,C or G
tgggataatgattcacatgtactaagacaacaactagtaaatgaacatgttacatctattattgaaccaaacattttggctaaaaaggaacatgtaatttgtattgcaaacgaaactgaagaaataaatttgctctcttctttaaatacttggggctatattgaatttgatgatctttttgagctcggtaatttggaaaatattttatttgctagatcaactataccatgtccttctcatgatatattttatattgctggcaagtacaacaacataggacaatttcttgtgcatagaatttctatttcatctagatatgttgtttcttcactttgtgcaaataagatattggtatgttctcaagaagaaaagaatctcttgtttccatgtactttagttgaagtttcaggtttatatttgaaagacattaataaaagcttagtcatcaacatcaatcatgatgcaaaaccgaggacggtttgctatcaagaaggggagaatgatgagaacataacccgcacagatatgaccatgttaatggctcctgctacaaagacattgaggaacaaagaagttgattggggatcaagtaatgatatttccaacatattaacaaagcaaacacatcatcaacgagcatgcccaatccacaactttaggtccaaaactcatgtttggggtggtttcgcgcaatttcattgctgcacgtcacccattccgaaaacgggtgatgaggacatcactgtcatcaatacaccacaccagcgacctccttcaccaataatcatggaccagtgaaacgagtccgtgcacgtaaatttaattatcaggtgaactcgttccttgttgttgaagctaatcattccttaaatgaggtactgataccttgtgattactttattattctaaggtgtttgggaggtgaaccatctagaatttgagaaggcaacaaggcaataaaagctgctccacttgaggggatttcgaaactacaacaagtgcaagtttaagagggcatatctttcagctcccaaggttgtttaatgcaaataagcacttgttggaaaggtctcttcatctactttctagtggatcaagaatcaacgagagatcagacactaagcgtccagaaactgccgagtgaactcctgctctacccaagtcaatttcgtaactgcagcatgcaccaaattaaatggagcataactttccactcccaaggttgtttagtgcaaataactactgatgaggacatcactatcattgatacaaccataccagtgaccacttcaccattcgtagctaatcaaggaccaatgacacgagcccgtgcacgtaaacttaattatcaggtgaactcgttctttgctattgaagctaattcttctttaaatgaggtactaaagccttgcgatgactttattatgctcaggtgtttgggaggtgaaccgtcttggactggagaaggcaacaaggcaataaaggctgctgcacccgagaggatttcgtaacagcaccaagtacaagtttaaatggggcatatcttccaacttccaaggccgtttaatgcaaataaatacttgttggaaagctcccttcgtctacttgctggtggatcaagaattaatgggagactacacccgaggcgtccagaaactgccgagggaacttcatgactccaccagaattccttcttcctatttctctatttaagcaactagcagccaccaaagaacttgggttttgtttgatgtaagtttagcctttgctacttccttgtaaacgcgtgtgtcggctagaccacccggatacttgaaacagaaccccaactctatcagatccgtgagcgtctgcgttttatcttgttcttgcttgttctcgattgcttgcaggttcaaggctgttcttggcacggcaagagcagcaacaacaggagccggtgtaactatcgctaaggcgcaacacccttgtggttgttgtagtcggatagcacaacgtcgacctccaccccaaatcgtagttatcaggagacggtgtacctgtcgctcaaggcgccacaccatcttggttgtggtagtcgggcagccaacgtcgttctccaacaagttttccacctctatcatctctcatcgaaagatcgggcacccttctacccgttgggtttatcaactacttgttggaaagctctcttcgtctactttcatgtgcatcaagaatcaatgacagaacccaaacgaggcatccagaaactgccgagagagtttcgttctccattagaactcctttctattcctctatttaagcaactagcagccaccaaagaacttgggtttttgtttgatgtaagtttagcctttgctacttccttgtaaacgcgtgtgtcggctagaccacccggatacttgaaacagaaccccaactctatcagatccgtgagcgtctgctttttatcttgttcttgcttgttctcgattgcttgcaggttcaaagttgttcttggcacggcaagagcagcaacaacaggagccggtgtaactatcgctaaggcgcagcacccttgtggttgttgtagtcggatagcacaacgtcgacctccaccccaaatcgtagttaccaggagacggtgtacctgtcgctcaaggcgccacaccatcttggttgtggtagtcgggcagccaacgtcgttctccaacaagttttccaccaccatcatctctcatcgaaagatcgggcacccttctacccgttgggtttatcaacgggtgagcattagtttttgccatcgaaactatttcttcgtttttcgcaacgaacatgtccaatccactactttaggtccaaaactcatgtttggggtggtttctcgcaatttcgttgccatacgtctgtctcttatacacatctcaaccctgaagctcttgttggctagtgcgtagtcgttggcaagctctagaggatccccacggcttcccgtgggacgtgtagcagcacgcaagcacttctcaatgcagcaggcacaggatgcccgcacgaacgatgggacacgggcgccgggagtcggctgcacggcagcgggggtcctccaagcagtcacgggtccaagacaactcatgcgccagcgtagccgctacggtcgagccatccaaagcatccctccgcgctgggcgcggcgggtctacttgcgaggacggcgaccgaaggtccaccgagcacgggagaaatggaaaacgcatcgagcaacgggccatcccacagtgcagccactcgtccagggcgtctggccggcgctagccagccatagccggtcgtggctgcgtcacggccgaaccatggccggccaggcagccaacagcgccagctggagctgggcgcggtagggtgctgaccggccacggctaggccgcgagggggtgcggggctcggccgaggagacctggaggagacgctggaaacgctatggtttcagcagcgttccgcccgggtttcggctgcacgagttccctaccccctactatacctgaggggcataccccctcccaggacttcggggagttcagccttcagaaaaccagggtattttccctggacgccacgaaacccatctaagatggccggacacaacgtttttgctcagaatcaggggtttcgctagcgtgacccgttttccctcacgggtcgacccgaacttcgatgtctcacgcggggggaccacgggagggtcccgtgcccttccacgtgcccgtttttgcggccgtggccgaaaatccgtttttggcccgtgcgccatggcgaacccctcgttttcagcccaaacgcaaggccgaacagccctgccacccgtggcagcgcgcctccgagccgttttccctccgttccaccgtgcccttcactcaagacatgcactttaggttcggtgtctttccacatgcttggacttagcttattttcggggtcgtgcccgagcctcagttttcggcccgtgcgccatggcgaacccctcgttttcagcccaaacgcaaggccgaacagccctgccgcctgtggcagcgcgcctcctcccgttttccctccgttccaccttgcccttcactcaagacatgcactttaggttcggtgtctttccacatgcttggacttagcccgtttttgcggccgtggccgaacctcagttatcagcccgcgcgccatggcgaacacctcgttttcagcccaaacgcaaggccgaacagccctgccgcccgtggcagcgcgcctcctcccgttttccctccgttccaccttgcccttcactcaagacatgcactttaggttcggtgtctttccacacgcttggacttagcccgttttcgcggccgtggccgaacctcagttttcagcccgcgcgccatggcgaacacctcgttttcagcccaaacgcaaggccgaacagccctgccgcccgtggcagcgcgcctcctcccgttttccctccgttccaccttgcccttcactcaagacatgcactttaggttcggtgtctttccacacgcttggacttagcccgttttcgcggccgtggccgaacctcagttttcagcccgcgcgccatggcgaacacctcgttttcagcccaaacgcaaggccgaacagccctgccgcccgtggcagcgcgcctcctcccgttttccctccgttccaccttgcccttcactcaagacatgcactttaggttcggtgtctttccacatgcttggacttagcttattttcggggtcgtgcccgagcctcagttttcggcccgcgcgccatggcgaacacctcgttttcagcccaaacgcaaggccgaacagccctgccgcccgtggcagcgcgcctcctcccgttttccctccgttccaccgtgcccttcactcaagacatgcactttaggttcggtgtctttccacatgcttggacttagcttattttcggggtcgtgccctagcctcagttttcggcccgtgcgccatggcgaacccctcgttttcagcccaaacgcaaggccgaacagccctgccgcccgtcgccacgcgcctgctcccgttttccctccgttccaccttgcccttcacttaagacatgcactttaggttcggtgtctttccacaagcttggacttagctaattttggaggtcgtgcccgagcctccgatttcggcccgtgcgccatggcgaacccctcgttttcagcccatacgcaaggccgaacagccctaccgcccgttgccgcgtgcctccgtgtcgttttccctccgttccaccgtgcccttcaccaaagacatccactttaggttcggtgtgtttccacatgcttggacttagtttattttcgggttcgtgccacagccaccatttccggcccgcgcgccatggcgaaccacctgtttttagcccagacgcattgccgaacagccctgccgcccgtcgccgcgggcctccgtgtcgttttccctccgttccatcttgcccttcacccaagacatacacattagcttcggtgtctttccacacgcttggacttagcttatttccgaggccgtgccccagccgctgttttcggcccacgcgccatggcgaaaccctcgttttcagcccaaacgcaaggccgaacagccatgccgcccgtcgccgcgcgcctccgtgtcgttttccctccgttccaccgtgcccttcacccaagacatacacattagcttcggtgtctttccacacgcttggacttagcttatttccgaggccgtgccccagccgccgttttcggcccgcgcgccatggcgaaaccctcgttttcagcccaaacgcaaggccgaacagccatgccgcccgtcgccgcgcacctcctcccgttttccctccgttccaccttgaccttcactccagacatgcactttaggttcggtgtctttccaaacgctgggacttagcccgttttcggaccgtggccgaaccgttgttttcggaccacgcgccatggcgaacacctcgttttcagcccaaacacaaggacgaacatccctgccgcccgtcgccgtgcgcctccgtgccggagcctcagttcgtcgcgtgcctccgtgtcgttttccctccgttccactgtgcccttcaccaaagacatacactttaggttccgtgtctttccacacgcttggacttagcttattttcgagttcgtgcctgagcctcagttttcggcccgtgcgccatggcgaacacctcgttttcagccaggacgcaaggccgaacagccatgccgcccgtcgtcgcgtgcctccgtgtcgttttccctccgttccaccgtgcccttcactcaagacatacaaacaccttagcttcggtgtctttccattccacacgcttggacttagcttattttcgaggtcatgcccgagcctcagttttcggcccgtgcgccatggcgaacccctcgttttcagcccagacgcaaggccgaacagccctgccgcccgtcgccgcgcgcctccgtgccgttttccctctgttcctccgtgcccttcacccaagacatacatattagcttcggtgcctttccacacgcttggacttagcttattttcggggtcgtgcctgaacctcatttttcggcccgtgcgccatggcgaacccatcgttttcggcccaaacgcaaggccgaacagccatgccgcccgtcgtcgcgcgcctccgtgtcgttttccctccgttccaccgtgcccttcactcaagacatacatacaccttagcttcggtgtctttccattccacacgcttggacttagcctattttcgaggtcgtgccccggtcgccgtttgcggcccgcgcgccatggcgaacccctcgttttcagcctagacgcgtggccgaacagccctgccgcccatcgccaacgttccatcgtgcccttcacccaaggcatacgtaggagcttcggtttctttccacacgctgggacttagcttttcttgtggtcgtgcacgaactcacggcggttttcggcctcttgccacgctgcgccttggacgtttccgttcggaagatcggtgcccctctcccgtgggttcgaaacctagtcgctgggcgctgtgtagagtggggggagggacgaatccgtgcgacgcggggctggatctcagtggatcatggcagcaaggccactctgccacttacaatgccccgtcgcgttttaagtcgtctgcaaaggattcagcacgccgcccgttgggaagggagcttcgaggcggcccgccgcggcgcgtcgaccgggcgggctgagccaatggcacgggcccttggggcgcgaacgccctaacgtgggtcggggcgggcggcgagcagaggcgccggttgctagcttggattctgacttagaggcgttcagtcataatccggcacacggtagcttcgcgccactggcttttcaaccaagcgcgatgaccaattgtgtgaatcaacggttcctctcgtggagcttcggtccgggtcacctttgtccaccaagatggaactgcggccggccgctcattaattaagtcaggcgcgcctctagttgaagacacgttcatgtcttcatcgtaagaagacactcagtagtcttcggccannnnnnnnnnnnnnnnnnnnnnnnnnnnnnnnnnnnnnnnnnnnnnnnnnnnnnnnnnnnnnnnnnnnnnnnnnnnnnnnnnnnnnnnnnnnnnncagatcagcttgcatgcctgcagtgcagcgtgacccggtcgtgcccctctctagagataatgagcattgcatgtctaagttataaaaaattaccacatattttttttgtcacacttgtttgaagtgcagtttatctatctttatacatatatttaaactttactctacgaataatataatctatagtactacaataatatcagtgttttagagaatcatataaatgaacagttagacatggtctaaaggacaattgagtattttgacaacaggactctacagttttatctttttagtgtgcatgtgttctcctttttttttgcaa

SEQ ID NO: 740 - DNA, 7907 bp, Zea mays
  source (0)...(0): Zea mays BAC clone full insert sequence contig bacm2.pk174.e4.fis12
gcaaaataagttttgtctttaacaaaacaggggcggtttgggccccgctacctggtgttttgaggtgtgtacccaacacaaaaagagttggtacacacctctcttagccttgtttgtgcgcagatgttgtgagcgcggtgatgctcggtacaatactcgacacaaggcttcggcaggaaagaactgccagtgttgggcactgccctcgcttgttcgttgggggcattggggggaaataatttgggggaaccaccccattccctagaatttggacggggagggatagtatttttgtggttgttgaaagaaggagaaaatttccactggcaaaaacttctgattttacccacccgacacccggttttggaatggttgacatgtgacaaagaaattgtgggaaaccaccccaaaccagtgttttgtacccgaaatggtgggtttggcattttttttgggaaaaatgaagaaaaggttctgggggcaaaaaattgtggttggtatgcacctcgacacccgtttttggaatgggtgacgtgggacaatgtaattgcgtgaaaccaccccaaacatgacttttggacctaaagtagtggattgggcatgtttgttgcgaaaaacgaagaaatggttccggtggcaaaaaatcgtgttttgtatgcacccgacacccgttttcggaatgggtgacgtgcgacaacgaaattgcgtgaaaccaccccaaacatgagttttggacctaaagtagtggattgggcatgttcgttgcaaaaaacgaagaaatggttccggtggcaaaaactcgtgctttgtatgcacccgacacccgttttcggaatgggtgacgtgcgacaacgaaattgcgcgaaaccaccccaaacatgagttttggacctaaagtagtggattaggcatgttcgttacgaagaacgaaatttcagattttttggacacccgagcgaaaagttatgcccgttttacggaaaacgaccggaatgaaacaaccgtatcctttctccttcgttttctttttttttgtttctgtttttttttggacacccgagcgaaaagttatgcccgttttacggaaaacgaccggaatgaaatgatgtagctgaggtgcccgatctttcggcgagtagagataattccgatttggcggaagttgacccttgcgatccgactacgacgagcaagcccgaggcgccaatgcaatcgctgaaccaactccctgtggttaccgaccttggtgatgcgagatcggcctgatcacgaagatcgtttcctgtgcgcaatcgaagaacgaacaagaaaaagatgcgagcaatctaatctattactcgagggtggagttctgaatacacgaagacagcgcagatttgcgcgtgttcgagagtagctaaagctaatgtaaaacaaaactcggaaataaaggaggcgcagctcctgaataaatagagagggggcgcagcccctaggggcggccaaccctaggtcgtccattatgggccgcaattgggctggtcgtctattcttccgggccttcgttctttaacaacatgatgtagttcaattctcttgcacgggcccgagtcactggcccaggtggaaggggtggcgcctgggctggagaaggtgctgctggtgtagatgtgctcgtgttggtgttgatgtccgcatcatcctccccttcttgaactgaagtcgtcctcgacggcaactcctcatcttctcccgcatacggtttcaaatctgcaacattaaaactagtggaaacaccaaactccgcaggtaggtcgagggtataagcattatcattaatcttggttagtatcttaaaaggaccagcagcacgaggcatcaatttagaacggcgcaaagtaggaaaacgatcctttctcaaatgcaaccaaaccatatcaccaggttcaaaagtaacatgttttcttcctttactaccagcaacctgattttttgtattagtagcagcaatgttctgtttcgtttgttcatgtatggtaatcatttgttcaacatgtgcagaagcatctacatgtggggcgttcgcagcattaagtgaaatcaaatcaataggtgccctaggaatgtaaccataaacaatctggaaagggcacatctttgtagaagaatgcgtggcatgattgtaagcaaattcaacatgaggcaagcaatcctcccaacgtctcaaattcttgtctaaaacagccctaagcatggtagataaagttctatttactacctcagtttgtccatcagtctgagggtgacaagtagtgctaaacaataatttagttcccaatttattccaaagagatctccaaaaatggcttagaaacttagcatcgcgatcagagactattgtttttggaataccatgtaaacgaataatttctctaaagaacaattcagcaacaatgctagcatcatcagttttatgacaaggtataaaatgagccattttagagaatctatcaacaaccacaaaaatactatccctccccttcttagttctaggcaagcccaaaacaaagtccatagagatatcaagccaaggagaagaagggacatgcaaaggcatatacaaaccatggttgttcaaccgtgacttagctttctgacaagtagtgcagcgtgcaacaaggcgctccacatcagcgcgcatccgaggccaaaagaagtgggcagccaacacctcatgtgtcttgtagacgccaaaatgccccatgagaccgcctccatgcgcttcctgtaacaacaaaagacgaaccgagctagctggaacacacagcttgttagcgcgaaacaggaacccatcctgtatgtgaaatttgccccatggtttcccattaatacaatggccgaaagcatctttaaaatcagcatcgtcaacatattgatccttcacagtgtccaaaccaaagattttaaaatctaactgtgacagcatggtatagcgacgagacaaagcatcagcaataacattgtccttcccgttcttgtgtttaataatgtaaggaaaggactcaatgaattctacccatttagcatgacgacggttcagatttgtttgggtacgaatatgttttaaagcctcatgatcagaatggattatgaactcacgatgccaaagatagtgctgccatgtatgcaaagtgcgcactaaagcgtaaagctccttatcataagtagaatatttcagactagcaccgcttaatttttcactaaaataagcaactggttttccttcttgtaacaaaacagcacctagcccaataccgctagcatcgcattcaagctcgaaaactttattaaaatcaggcaattgcaagaggggagctttggttaacttatctttcaaagtgctgaacgctacctcctgcgaatcactccaggcaaacggcacatctttctttgtaagctcatgtagaggcgctgcaatggagctaaaatcacgaacaaatctgcggtagaaaccggcaagtccaagaaagctccgaatttgtgtgaccgtcgtcggtgtaggccactcccgaatggcagcaatcttgctgctatccacctcaatgccctgcggagtaaccacataaccaagaaacgagacacgttgcgtgcaaaatgtgcacttttccatgttaccaaacaagcgagcagcacgcaaagcgtcaaaaacagcacgcaaatgttctaaatgctcctctatagacttgctgtaaataaggatatcatcgaaataaacaacaacaaacaaacctatgaaggcccgtagaacttcgttcattaaacgcataaaggtgctgggagcattagtcaatccaaatggcataaccaaccattcatataaaccaaatttcgttttaaaagccgttttccattcatcaccgagtttcattctaatctgatggtaaccgctacgcaaatcaaccttagagaaaataacggcaccactaagctcatctagcatatcatcaaggcgtggaataggatatcgataacgaactgtgatgttattaatagcacgacaatctacgcacatacgccatgacccatctttctttggaacgagtaaaacgggaaccgagcaagggctaagagactcacgaatgtaacccttatcaagcagcgtctgcacctggcgctggatctccttcgtctcatctggatttgtacggtacggagcgcggttcggaagagaagcgccggggatgagatcgatctgatgctcaatgccacggaggggaggaagacccggtggtaagtccgtaggataaacatcagcatactcctgcaaaaggttaacaacagcagggggtatatccaaagacggtgcatcatcaagcggaacaagcattcgcgagcatacaagtgcataacagggcatatgagcttcatggagatcatcaaaatcagcacgtgtagcaagtaaaacaggagagtgcaacttgatttcagatttaataggtgcggctgatgtcgatttgacttgttgtgcagttttagcagccctagtaagatcatctttcaaaatttggtcaggggtcattggatgtataattattttctggcctttaaacatgaaagaataatgatttgaacgaccatgatgtaaactatcagtatcatattgccaaggtcgacctaataacaaagagcatgcttccataggaataacatcgcaatcagcataatcagaataagaacccagcgaaaaggggacacgtaccgaacgtgttacctttattttaccaccatcattaagccattgaatgtgatacggatgtggatgtgtgcgagtgggcaaggataatttctctaccaacgctgtacttgccaaattgttgcagctgccactatcgatgatgatgcgaatcgaccgttcttgcacgacgcccttggtatggaatagagtgtgtcgctgatttttttcggcctgggcaacctgtgtgctgagaacacgctgcacaacaagactctcatacctatcggcgtcgataggatcaacgtggacttcctcattttctgcatggttagtggcaatcatagcatgactagtttcctcagaatcactggctgaagagtactcaccattgtcacgtataagcaaggtacgcttgtttgggcagtcccgaatcatatgcccaaaccctctacaacgatggcactgaatatcccgtgtacgtcctgtggaagaagcggcgcctttggcagggggcgccactggcttggtcgtccctgtgcgcgatgtagtgctaggcgtagaaggtgcagggctggaaggagttgagctgtgtgttggaccccggcctgcaagagagttagtatatgtctttgatcgtcgtccctgcacttcacgttcagctttgcaagcatattcaaacaatgtggttatatcaaaataatccttataatcaagtatatcctgaatttccctgttcaaaccaccacgaaaacgcgccatagcagcgtcatccgactcaactaaaccacaacgaagcatacccttttgtaactcctggtaataatcctcaacagactgtgaaccttgttgaaaacgctgcattttgttaagcaaatcacgagcataataggaaggaacaaatctgtggcgcatggcagtttttaattgggtccaagtaatgacactgttaatgggaagtttttgtttatactcacgccaccaaattaaagcaaaatcagtaaattcactaatggcagccttcacttggctattagcaggaatatcatggcatgaaaatttctgttctacctctaattcccaatcaagatatgcagcaggatcatatttaccattaaaagatggaattttaaatttaatcttagaaaataagtcattagggggatgacgaaccacacgacgtgcacgaccacgacgatctccatcgtcctgctcagtgtcaccgccatattcctgctccatctttgtggtcagtgcatcaaggcgtgccaggatggtgtcgagtgtggtgcgagtcgccgtttgagcaaggtcaagttggttgaaacgctcggtcgtcgaagtgatcgttgaatcaagccgttcatgcatggtcctaatgtcagcagcaagtccatcaacttgtccccttacttcctgcaactgggcatccaccatgtcgtgtgctcctgccatagttagcgcaaacaccaaaaggagaaaaaccaacgacaaaaacaggggtgtactgctcacaaggcgctcacactagtgctgttatcaagttcttatccgttcttaccaagccacagtggtgaactgcaaccaacaggtggaaccggtgaaagattggatgagcgattgcgtggagaaacagaaacctgctcgtcgtagaaatatgtggagttgtgggtaggctgcactcaagtcaaggattagcacgatcaaacaataatgcaaagttgaattatagtgcaaaacacgaaactatattgctggccacaggtgcaaaggatggatggaactagcagaatggcagtaacgtaaatattgtactagtgatgccaaaaaggcactagtagaaatcacaggtgattttgtttttcttttttttatgatttttttgatatttttctcagcacaagaagcaacaagataggagctacacgaagtttcacctaaaacagatatcagatgtggtctacagaaaatcaggaagttctctgaaaagcgtgcgagaactttgacgaatttttttctttattttcctgaatttttttgacaattttgtcgaaccccaaacagaccgtaggtgagtttggccgggctcagaatggtgtcaactagctcctgtaaaaatttcagattttttggacacccgagcgaaaagttatgcccggtttaaggaaggtatctcaagttatgttttcaaacgaccgggatgaaacaaccgtatcctttctccttcgttgtttttttgtttctgttttttttacgtaaccgaaggagaaaaacaaggaaacgatgttgactcggtttgtttttttttctgtttttttttttgtaaccgaaggagaaaatcaaggaaacggccgttgactcggtttgttttttctgttttgttttttacgtaaccgaaggagaaaaacaaggaaacaatgttgactcggtttgtggcgtgatcaaacgggagatggtggcggcgctatggtttgaatggaggaagaacacaatgtaaccagcaacaaatgacgcgaaagcacacaaattcaacaatgcagattattgaaagaaagtgcgaggctcaaaagggtgctgggataagatctaacctgaatttttatgtggttttgtggactgtaggaaaaaaaaacgctcgataaactcaccgatcaacctggaaatctgataccaattgatgtagctgaggtgcccgatctttcgacgagtagagataattccgatttggcggaagatgacccttgcgatccgactacgacgagcaagcccgaggcgccaatgcaatcgctgaaccaactccctgtggttaccgaccttgctgatgcgagatcggcctgatcacgaagatcgtttcctgtgcgcaatcgaagaacgaacaagaaaaagaggcgagcaatctaatctattactcgagggtggagttctgaatacacgaaaacagcgcagatttgcgcgtgttcgagagtagctaaggctaacgtaaaacaaaactcaggaaataaaggaggcacagctcctgaataaatagagagggggcgcagcccctaggggcggccaaccctatgtcgtccattatgggccgcaattgggctggtcgtctattcttccgggccttcgttctttaacaacatgatgtagttcaattctcttgcacgggcccgagtcactggcccaatggaaggggtggcgcctgggc

SEQ ID NO: 741 - DNA, 9903 bp, Zea mays
  source (0)...(0): Zea mays BAC clone full insert sequence contig bacm2.pk174.e4.fis13
attgagtcctttccttacattattaaacacaagaacgggaaggacaatgttattgctgatgctttgtctcgtcgctataccatgctgtcacagttagattttaaaatctttggtttggacactgtgaaggatcaatatgttgacgatgctgattttaaagatgctttcggccattgtattaatgggaaaccatggggcaaatttcacatacaggatgggttcttgtttcgcgctaacaagctgtgtgttccagctagctcggttcgtcttttgttgttacaggaagcgcatggaggcggtctcatggggcattttggcgtctacaagacacatgaggtgttggctgcccacttcttttggcctcggatgcgcgctgatgtggagcgccttgttgcacgctgcactacttgtcagaaagctaagtcacggttgaacaaccatggtttgtatatgcctttgcctgtcccttcttctccttggcttgatatctctatggactttgttttgggcttgcctagaactaagaaggggagggatagtatttttgtggttgttgatagattctctaaaatggctcactttataccttgtcataaaactgatgatgctagcattgttgctgaattgttctttagagaaattattcgtttacatggtattccaaaaacaatagtctctgatcgcgatgctaagtttctaagccatttttggagatctctttggaataaattgggaactaaattgttgtttagcactacttgtcaccctcagactgatggacaaactgaggtagtaaatagaactttatctaccatgcttagggctgttttagacaagaatttgagacgttgggaggattgcttgcctcatgttgaatttgcttacaatcatgccacgcattcttctacaaagatgtgccctttccagattgtttatggttacattcctagggcacctattgatttgatttcacttaatgctgcgaacgccccacatgtagatgcttctgcacatgttgaacaaatgattaccatacatgaacaaacgaaacagaacattgctgctactaatacaaaaaatcaggttgctggtagtaaaggaagaaaacatgttacttttgaacctggtgatatggtttggttgcatttgagaaaggattgttttcctactttgcgctgttctaaattgatgccttgtgctgctggtccttttaagatactaaccaagattaatgataatgcttataccctcgacctacctgcggagtttggtgtttccactagttttaatgttgcagatttgaaaccgtatgcgggagaagatgaggagttgccgtcgaggacgacttcagttcaagaaggggaggatgatgcggacatcaacaccaacacgagcacatctacaccagcagcaccttctccagcccaggcgccaccccttccacctgggccagtgactcgggcccgtgcaagagaattgaactacatcatgttgttaaagaacgaaggcccggaagaatagacgaccagcccaattgcggcccataatggacgacctagggttggccgcccctaggggctgcgccccctctctatttattcaggagctgcgcctcctttatttcctgagttttgttttacgttagccttagctactctcgaacacgcgcaaatctgcgctgtcttcgtgtattcagaactccaccctcgagtaatagattagattgctcgcatcttgttcttgttcgttcttcgattgcgcacaggaaacgatcttcgtgatcaggccgatctcgcatcagcaaggtcggtaaccacagggagttggttcagcgattgcattggcgcctcgggcttgctcgtcgtagtcggatcgcaagggtcatcttccgacaaatcggaattatctctactcgccgaaagatcgggcaccttagcttcatcaattggtatgcccgttttacggaaggtacctcaagttatgttctaaaaacgaccgggatgaagcaactgtatcctttctccttcgttatcttttttttctgttttttttgacgtaaccgaaggagaaaaacaaggaagcggccgttgactcggtatgtttttttttctgtttttttttcgtaaccgaaggagaaaatcaaggaaacggccgttgactcggtttgttttttctgttttttttttcgatgatatccttatttacagcaagtctatagaggagcatttagaacatttgcgtgctgtttttgacgctttgcgtgctgctcgcttgtttggtaacatggaaaaatgcacattttgcacgcaacgtgtctcgtttcttggttatgtggttactccgcagggcattgaggtggatagcagcaagattgctgccattcgggagtggcctacaccgacgacggtcacacaaattcggagctttcttggacttgccggtttctaccgcagatttgttcgtgattttagctccattgcagcgcctctacatgagcttacaaagaaagatgtgccgtttgcttggagtgattcgcaggaggtagcgttcagcactttgaaagataagttaacccaagctcccctcttgcaattgcctgattttaataaagtttttgagcttgaatgcgatgctagcggtattgggctaggtgctgttttgttacaagaaggaaaaccagttgcttattttagtgaaaaattaagcggtgctagtctgaaatattctacttatgataaggagctttacgctttagtgcgcactttgcatacttggcagcattatctttggcatcgtgagttcataattcattctgatcatgaggctttaaaacatattcgtacccaaacaaatctgaaccgtcgtcatgctaaatgggtcgaattcattgagtcctttccttacattattaaacacaagaacgggaaggacaatgttattgctgatgctttgtctcgtcgctataccatgctgtcacagttagattttaaaatctttggtttggacactgtgaaggatcaatatgttgacgatgctgattttaaagatgctttcggccattgtattaatgggaaaccatggggcaaatttcacatacaggatgggttcctgtttcgcgctaacaagctgtgtgttccagctagctcggttcgtcttttgttgttacaggaagcgcatggaggcggtctcatggggcattttggcgtctacaagacacatgaggtgttggctgcccacttcttttggcctcggatgcgcgctgatgtggagcgccttgttgcacgctgcactacttgtcagaaagctaagtcacggttgaacaaccatggtttgtatatgcctttgcctgtcccttcttctccttggcttgatatctctatggactttgttttgggcttgcctagaactaagaaggggagggatagtatttttgtggttgttgatagattctctaaaatggctcattttataccttgtcataaaactgatgatgctagcattgttgctgaattgttctttagagaaattattcgtttacatggtattccaaaaacaatagtctctgatcgcgatgctaagtttctaagccatttttggagatctctttggaataaattgggaactaaattattgtttagcactacttgtcaccctcagactgatggacaaactgaggtagtaaatagaactttatctaccatgcttagggctgttttagacaagaatttgagacgttgggaggattgcttgcctcatgttgaatttgcttacaatcatgccacgcattcttctacaaagatgtgccctttccagattgtttatggttacattcctagggcacctattgatttgatttcacttaatgctgcgaacgccccacatgtagatgcttctgcacatgttgaacaaatgattaccatacatgaacaaacgaaacagaacattgctgctactaatgcaaaaaatcaggttgctggtagtaaaggaagaaaacatgttacttttgaacctggtgatatggtttggttgcatttgagaaaggatcgttttcctactttgcgccgttctaaattgatgcctcgtgctgctggtccttttaaggtactaaccaagattaatgataatgcttatatccttgacctgcctgcggagtttggtgtttccactagttttaatgttgcagatttgaaaccgtatgcgggagaagatgaggagttgccgtcgaggacgacttcagttcaagaaggggaggatgatgcggacatcaacaccaacacgagcacatctacaccagcagcaccttctctaccccaggcgccaccccttccacctgggccagtgactcgggcccgtgcaagagacttgaactacatcacgttgttaaagaacgaaggcccggaagaatagacgaccagcccaattgcggcccataatggacgacctagggttggccgcccctaggggctgcgccccctctctatttattcaggagctgcgcctcctttattctccgagttttgttttacgttagccttagctactctcgaacacgcgcaaatctgcgctgtcttcgtgtattcagaactccaccctcgagtaatagattagattgctcgcctctttttcttgttcgttcttcgattgcgcacaggaaacgatcttcgtgatcaggccgatctcgcatcagcaaggtcggtaaccacagggagttggttcagcgattgcattggcgcctcgggcttgctcgtcgtagtcggatcgcaagggtcatcttccgctaaatcggaattatctctactcgccgaaagatcgggcacctcagctacatcaacgtatggcaacgaaattgcgcgaaaccaccccaaacatgagttttggacctaaagtagtggattgggcatgttcgttgcgaaaaacgaagaaatggttttgatggcaagctcacccgttttcggaatgggtgacgtgcagcaacgaaattgcgcgaaaccaccccaaacatgagttttggacctaaagttgtggatggggcatgctcgttgcaaaaaacgaagaaacggttccggtggcaaaaactcgtgctttgtatgcaccccaagacccatttttcggaatgggggacgtgcggcaacgaaattgcgcgaaaccaccccaaacataagttttggacctaaagtagtggattgggcatgttcattgcgaaaaatgaagaattggttccggtggcaaaaactcgtgctttgtatgcaccccgacacccgttgatgaagacatccacactactgatacatctatgccaatacaagtaccaatttctggtcccattactcgcgctcgtgctcgtcaactcaaccatcaggtgattacactcttgagttcatgtccatcatatttagaccatggagacccgtgcactcttgttttgcttaggaaccagggagaagaccgaaagggaaaggatttgaacatgctggattcggactgcagaagaacaccaacttgtgacggtcaccacggtcagatgcgggcttggattggaatgttcaagcacaacatggaaagcttatcaagtctactttcatatggatccggaattatagtcatatctgttctgaggtcgccgtaatcattgttttcttaccgagacatttcctgccttttctgcccatggtgctgcgtcaccctattttggcccaatgggtcgtgtattaagttaggtccattagagacgcatcctagggttgcagcacgaccccaatacccttgtggtcatcctcccatgtttataaaccccctagccgccaccaagaacagcgggttttgtttagatcaagtttagctctcgctacttgcttgtaagcgcgcgtgctagtcagccgcccgtcttcttgtcttcagaaccccaccatattggagtttgattttgaaacctacatttagatctggtaattcagtacttgttctacttgttcttgctagttcttcgattgcttgcaggacgagtgccctagtggccagggtgtcacgctccacaagatcgtgacagccataggaggtggtgtatcggttgctaaggtgcagcgtcttgggaaggctgtagtcgggtcgtgaacgtcgtcttctcccccaatcgagttattccacaccctctcatcgaaagatcgggcaatcacccaacgggtgcacatcagttggtaatcagagcaaggtttatcggtgagagatttacttttcttcgctgtttttttatctcctatagtccagaaaaagccaaaaaatagtagattagttttaccgcaatcctataaaccattgagcatttactagtactacttagttagggcttgttgagtttttggttgcatcggttgtgtcgagttgctggtcttagtttattcctttagagttttgagttctagcacgttttggtcaccacgagatccaccatcaccataaacatctctggttcgtttttgccaccacggatacatctcatgtccgatttggaagtttaaatacaatctggaaagcttatcttatcttctttccaacggatctgaccttgtctcaaaattcattctgagcgctccgcaatcatcgtagagatttctggactttctatattaacaagatttgttaaatctgatttaaaggggctgttagcaatatctttattgtttgggttgtcatagtgaaaaaaagggtttaggtccctgcaaaaaaaacagaagaagaaaaaaaaagaatagaaagaaaaaaaaggaaaagaagaagaagggggctgaatctctaaatctgttgtttctctttgtgctgtgctagttgttctttttcagtgactacctttgtgcctaggctcacgtctctagcatggtttagcctaggaccagcacagtaccaccgttgaacgattattcagcttgcttttgtaactaacgtggtacttgtgtattccttgcttcagcccacctacaactctacatattttgactacagtttgacaggtcgtgttgctgcggcaccgatacacttattccacggttgcagacttgttggttgttgacccctcctgttgtgcaaggtaagaattggtaagagcttgtgtggcaggttgagagtgagcgccttgcagtagctacatcctaatagttgtagagtttttattccttcacgttttttttcttgttgcctctgttcgtctaaccatggcaggattggaggttgatgatgcttctcgtaatatgccacactctcctcgcaccaagggtatcatacaacactttgtaaggctggtgaagacgcacacggaaggccttgataattacatgcaggtgacgaatgaaaagatggggcaattggaggccacacagatcgacacaaacaccaaacttgcaaatgtggaaatgacagttgctcatattgacaagagccttgtcgcactcttgaggcgatttgatgagatgcatgctaataccaatggtgggcgtgatgagggcgccgaaggtaactgggatgactatgttgctgatactgaacaagatgaccaagaagcacctaatcgccggcgactacgtactaaacgtaggtggttttcgccgacgtgaggtacatggtaatgatgatgcttttagtaaggttaaatttaaaatacctccttttgatggtaaatatgaccctgatgcttacattacttgggagatggcggttgatcaaaagtttgcatgccatgaatttcctgagaatgcgcgggttagagctgctactagtgagtttactgatttttgcttctgtttggtggatagaacatggtaagaagaatcctaataacatgccacaaacttgggatgcgttgaaacgggtcatgcgggctagatttgttccttcttattatgcacgtgatatgttaaacaagttgcaacaattgagacagggtactaaaagtgtagaagaatattatcaggaattacaaatgggtatgctgcgttgtaacatagaggaggctgaggaatctgctatggctagatttttgggcaggttaaatagggaaattcaggacatccttgcttataaagattatgctaatgtaacccgattgtttcatcttgcttgcaaagctaaaagggaagtgcagggacgacgtgctagtgcaaggtctaatgtttctgcaggaaaatctacaccatggcaacagcgcacgactacgtccatgaccgaccgtacaccagcaccaactccctcgccaagtcgaccagcacccccgccttcctccggcgacaaaccacgtgcatcttccacaaattcagcaaccaaatctgcctagaaaccagcaggtagtgcctcttcagtagcctccacgggtagaacaagagatgttctgtgttatcgatgcaagggctatggacacgtgcagcgtggttgtcctaatcagcgtgttttggtggtaaaagacgatggtgggtattcctctgctagtgatttggatgaagctacacttgctttgcttgcggctgatgatgcaggcactaaggaaccacccgaagaacagattggtgcagatgatgcagagcattatgagagcctcattgtacagcgtgtgcttagtgcacaaatggagaaggcagagcagaatcagcgacatacgttgtttcaaacaaagtgtgtcattaaggagcgttcatgtcgtttgatcattgatggaggtagctgcaaccacttggctagcagcgacatggtggagaagcttgcacttacgaccaaaccgcacccgcatccatatcatattcaatggcttaacaatagtggtaaggtcaaggtaaccaagctggtacgaattaatttagctattggttcatatcgtgatgttgttgactgtgatgttgtgcctatggatgcttgtaatattctgctaggtagaccatggcaatttgattcagattgtatgcatcatggtagatcaaatcaatattctctcatacaccatgataagaaaattattttgcttcccatgtcccctgaggctattgtgcgtgatgatgttgctaaagctaccaaagctaaaactgagaacaacaagaatattaaagctgttggtaataacaaagatggggtaaaattgaaaggacattgcttgcttgcgacaaaaactgatgttaatgaattatttgcttccactactgttgcctacgccttggtatgcaaggatgctttgatttcaattcaagatatgcagcattctttgtctcctgttattactaacattttgcaggagtattctgatgtatttccaagtgagataccggaggggctgccacctatacgagggattgagcaccaaattgatcttattcctggtgcatctttgccgaatcgtgcgccatataggacaaatccagaggaaacaaaagaaattcagcgacaagtgcaagaactactcgacaaaggttacgtgcgtgagtctcttagtccgtgtgctgttccggttattttagtgcctaaaaagacggaacatggcgtatgtgtgttgattgtagggctattaataatatcacgatacggtatcgacaccctattccacgtttagatgatatgcttgatgaattgagtggtgccatcgtcttttctaaagttgatttgcatagtgggtatcaccagattcgtatgaaattgggagatgaatggaaaactgctttcaaaactaagttcggattgtatgagtggttagtcatgccttttgggttaactaatgcacctagcactttcatgagattaatggacgaagttttgcgtgccttcattggaaaatttgtggtagtatactttgatgacatattgatctacagcaaatctatggatgaacatgttgatcacatgcgtgctgtttttaatgctttacgagatgcacgt

SEQ ID NO: 742 - DNA, 11695 bp, Zea mays
  source (0)...(0): Zea mays BAC clone full insert sequence contig bacm2.pk174.e4.fis14
  misc_feature (1)...(11695): n = A,T,C or G
acttaagaagggcttccttctgaagttgcaaagagaatgacattcgaagagcagttaacaagacaaacttgagtataaagaaagagtagcaccaatacaccttccagcaccctccaagggactctacctaaaatctcgggacgagattcctttaaggggggagggctgtaacaccccaggtgttgccatggctggagcacactttggcactcgagactatgatcacatgtggaagaacttaaggagcaaaagtataaggggctttggaaactaagtttttaccaagagttgggaatgaccaaaggcattaccctaattgtgtgcaactatcaccttgggagagggggaaagaaccctaggcctctcttaaaccctatctcccaaaaccatggataagaagggaaagagagtgagcaaatatgcaaaacatgggtaatctttacccaaaccctaagcaacattataaccatcaattaggggagggaaatattacaaaaaggcccctagggaaaccccaattcaaatctccaagtggagagagagctagagctctctaattccctctaagtcccattttagccctaaatcaaagatcaaccgtgttcactttaaaaatggcgccaaaaccacttgggttctataccaaaaatgtgcaataccacttagggcacccactggaaaaagttgagctcgagactcggacgtttgacatgccatggcatggcttttgtcgtgatatgctcagtatgacacacctgttttggcacccgaagatctccctccctaggccgtatctgccccggcgtctcacagttgagtgacagccctaggtgccaggaagaggtctgcgccggacttttgcaaagattcgcacgtttgcgacctctggcgacatttgaacactggaagaaacaaaccgccacgtgttcgacgccgtctgccgcgccagagcacgcccgcgcgcgcgcccgcgccgcgcccaagccaagccagtgccctggtccgcgtccgcgactataaaacgcccaggagccttggccgtacccctccgcacgcgctcaagcctcaccggagctcagttcgccgccgtttgcccatacacgacgtgcccgcggccacccgagcccctgccaccgtagaccggccagcccagccattcccaaccccgtccagcccttggagaagactgtgcacgtctccgtgaagctccccgagcgaggaatcgggctctgcttcaccggagaggccggcccaaggtcaccggacttcaaccgaccgccggcaaccgtggaccgaggtacaccgtgcgcctctcttcgattccttgcacggttagactccttagacctccacgaagctccctatgcccttggattgaactatgccgccgtggataggccggagcacacaccgccgacgagctcgcccgcctgctcacgtggaccgggcgattccggccatccccgacgacgagccgtacctcgacgtgatcgccaaaccctccccgagccaaccctacccttcgccggacctccctcgccgccggtaagccgcgccacccttttctttcccgcggctactgtttcagttgagggagggactgcgggtgagagggagagaaacccagggggttaagtgaaaggtcagagactcaagtgaatagtgccttaagggtagatctgcgaggtttgaattgttttaaacccagggacctcggcgcaaactgtttttccaggaaaacttaattaaaacctaatttaaattcaaacagaaactttaaaaacccataacttctgtttggtttatccaattttggtcaaaccaattttgccagactctaaatcatgtaacctatttaggaaaaatataaaaccccttggtgctgtggaaaacttaaaagttctgatttaatgttaactttggccaaaagctaaataatagcaagaaaaatggttgtattatttaactaaggttagaaaaatttagagaagttattatctacctactgacctagttaaaaatgttaaacacctctgtccactacattagggtagattttaccccttatcccataatatgtttaagattaagaaaaatgggaaaggtgacataaataaggaaccagagggcacccctatttttgttgagatacttattcaatatagttcactggaaaatatatcatactctggtttagtacaaattaagtaggatatcttttattttatttaaacaaggataacttagaaaaaccctacaaaaatgaccccaaggtaaacacacccccacccttgggataactattgttttattagaaagaacctaagaaaaatatgaaatctgctgtttgacatttttcaaataataaggtagtagaaagtgcctttttgacattaaacttgggaaaatcatagctaattaaccaccccttagtttcctgtgatttttagcacaaagacctatcattaccagaggatgccaacaaaaataacctttaggacagagcctacccctaactaggaggtgtagtgtaaagtgccccttattgcctaacttttgttatttttgtctaaggcctaacttttatactttaagcctcaaattcttaaaacaagctaaaatagctagtgacaacccactgtaatttttacagaatttttggaaattattaaaaccctgttgtagttcaaacctaccctagaaaccctaaatggaaattaaggaaagagaaatgaaagatatgaataaaggttgtccctaaaaactttatttgctgtccacaaaaatatatcaaagcaataccaaaccaatctgtgttatcctaaagccaaacctaagcttaaagggtaataagtcaaagtctatgtataccactagaagccccgcacaactaagaaaaccttaagttacttctcgacttagtttcttttgcataatgttattaaatcatgcataatcatgacatacatgttcattgcatttcgatagactgtaatcttgctgacggagagtacatcctcgtgccggagcaaggagctgctcaggaggtagccccagatccagcaccagagcctgcaccagaggacctgcctgccactgctttggaaggcaagccccggttttatgcataacctgttatttatgctattttacttcacttaatgattgtaggattgattgtgcacttaggtgtaggaattgtttgaaaccctagttgcatgatctcaggaatccttttgaaatgaatactagtatgacaggtcgagtagttgctttaattaaataggatctcggtagaagacgagtgatttttctagcactcgcgcgagatcagaaaattgattgtacccactttcacactgtcatgatactagttggtggacaacaatccatggggattggttgtttacgagatggaaaatggaataaggattaacgtgcggatacctgtgtcaagcgtttgaacgtactgagcacatgccgagaaatatggtaaatcggtaagcctagtacctgagtgaacccggcagtggacatatcccctcacgcgtcctgagacgaggtctcccattccggttatggtgggtacaagtgcggtcactgcacgatggccagtcggggtcagtgaggcattgtacgccaaggcggtgagccctgatctgctgacggggaatcgatggggacggttgatgtgtgtggggacggagtgcccctacatgtcgtgtgtttaggtttaccttgcaaggataaaaactcgattcgaatcgtctgcttctcgcagctaatgagactgcttgatccattgtactgcattgagtaataagtggaagtatgatgagttgagataagatgttgactgttaatgatgcttgctaccatgtatgagtagatagtccacttttagccttaagagagtcacacttaactttgattaagttaaaatcttgatttagaaactcagctagtgcttttggcaaccaaaccccacagccaaacagctgcatgtctagaggtagaggagtagactcctcacaccgggtaagtctagttgagtattagtatactcagccttgcttgtggcataatttttacaggttctctggaggagatggttgctgggattacttggccgaccaccctgccaccgggttggactgtcgagtgggaccctgcctcggctgaggaggagcatgaggagtgatgggacaggcttccccatctctctgttttatttaccgttagttttattccgctgcacttcgaacaatgatggatacttttgcaaaaactccgatgatgatgatggcgatgtaataatttaacattatgacatgtatggttttatgctttattgtatttgctctgtgactcaccttcgagtgagattgtggtacttgatcctgtcagtggccgtgtcggactagatccgagggattgacgggttattcccatttaagtgtggtctagcctctaaggcgggacttggacacttaagttggaataattcgggcagttccgccacatgggtgacgtgcgacaacgaaattgcgcgaaaccaccccaaacatgagttttggacctaaagtagtggattgggcatgttcgttacgaagaacgaagaaatggttccggtggcaaaaactcgtgctttgtatgcaccccgacacccgttttcggaatgggtgacatgcggcaacaaaattgcgcgaaaccaccctaaacatgagttttgtacctaaagtagtggattgggcatgttcgttgcgaaaaacgaagaaatggttccggtggcaaaaactcgtgctttgtatgcaccccgacacccgttttcggaatgggtgacgtgcgacaacgaaattgcgcgaaaccaccccaaacatgagttttggacctaaagtagtggattgggcatgttcgttgcgaaaaacgaagaaatggttccggtggcaaaaactcgtgcttttatgcactcgacacccgttttcggaatgggtgacgtgcgacaacgaaattgcgcgaaaccaccccaaacatgagttttgtacctaaagtagtggattgggcatgttcgttgcgaaaaacgaagaaatggttccggtggcaaaaactcgtggttttatgcacccgacactcgttttcggaatgagtgaagtgcggcaacgaaattgcgcgaaccaccccagacatgagttttggacctaaagtagtgcattgggcatgttcgttgcgaaaaacgaagaaatggttccggtggcaaaaactcgtgcttttatgcacccgacacccgttttcggaatgggtgacatgtgacaacgaaattgcgcgaaaccaccccaaacatgagttttgtacctaaagtagtggattgggcatgttcgttgcgaaaaacgaagaaatggttctggtggcaaaaactcgtgcttttgtatgcaccacgacacccgttttcggaatgggtgacgtgcgacaacgaaattgcgcgaaaccaccccaaacatgagttttggacctaaagtagtggattggacatgttcgttgcgaaaaacgaagaaatggttccggtggcaaaaactcgtgctttgtatggactcgacacccgttttcggaatgggtgacgtgcgacaacgaaattgcgcgaaaccaccccaaacatgagttttggacctaaagtagtggattgggcatgttcgttgcaaaaaacgaagaaatggttccggtggcaaaaacttatgctttgtatgcacccgacacccgttttcggaatgggtgacgtgcgacaacgaaattgtgcgaaaccaccacaaacatgagttttggacctaaagtagtggattgggcatgttcgttacgaagaacgaagaaatggttccggtggcaaaaactcgtgctttgtatgcaccccgacacccgttttcggaatgggtgacatgcggcaacaaaattgcgcgaaaccaccctaaacatgagttttgtacctaaagtagtggattgggcatgttcgttgcgaaaaacgaagaaatggttccggtggcaaaaactcgtgctttgtatgcaccccgacacccgttttcggaatgggtgacgtgcgacaacgaaattgcgcgaaaccaccccaaacatgagttttggacctaaagtagtggattgggcatgttcgttgcgaaaaacgaagaaatggttccggtggcaaaaactcgtgcttttatgcactcgacacccgttttcggaatgggtgacgtgcggaaacgaaattgcgcgaaaccaccccaaacatgagttctggacctaaagtagtggattgggcatgttcgttgcgaaaaacgaagaaatggttccggtggcaaaaaatcgtgcttttatgcactcgacacccgttttcggaatggttgacatgtgacaacgaaattgcgcgaaaccaccccaaacatgagtttgtacctaaagtagtggattgggcatgttcgttgcgaaaaacgaagaaatggttccggtggcaaaaactcgtgctttgtatgcacccgacacccgttttcggaatgggtgacgtgcgacaacgaaattatgcgaaaccaccccaaacatgagttttggacctaaagtagtggattgggcatgttcgttacgaaaaacgaagaaatggttccggtggcaaaaactcgtgctttgtatgcaccccgacaaccgttttcagaatgggtaacgtgcggcaacaaaattgtgcgaaaccaccccaaacatgagttttgtacctaaagtagtggattgggcatgttcgttgcgaaaaacgaagaaatggttccggtggcaaaaactcgtactttgtatgcaccccgacacccgttttcggaatgggtgacgtgcgacaacgaaattacgcgaaaccaccccaaacatgagttttgtacctaaagtagtggattgggcatgttcgttgcgaaaaacgaagaaatggttccggtggcaaaaactcgtactttgtatgcacccgacacccgttttcggaatgggtgacgtgcgacaacgaaattgtgcgaaaccacccctaacatgagttttggacctaaagtagtggattgggcatgttcgttacgaaaaacgaagaaatggttccggtggcaaaaactcgtgctttgtgatgaggacatcactatgagtacgactataccagcagcacctccacatcaagcgccacttccttcattagctgggccaatcactcgggcccgtgccagagatcttaacttcgtcgagctactgaagaatgagggcccagaagaatagacgaccagcccaactgcagcccatagtggacgacctagggttggccgccctaggggctgcgccccctctatttatgcaggagctgcgcctcctttattttcgagttttgttttacgttagccttagctactctcgaacacgcgcaaatctgcgctgtcttcgtgtattcagaactccaccctcgagtaatagattagattgctcgcatctttttcttgttcgttcttcgattgcgcacaggaaacgatcttcgtgatcagaccgatctcgcatcagcaaggtcggtaaccacagggagttggttcagcgattgcattggcgcctcgggcttgctcgtcgtagtcggatcgcaagggtcatcttccgccaaatcggaattatctctactcgccgaaagatcgggcacctcagctacatcactttgtatgcaccccgacacccgttttcggaatgggtgacgtgcgacaacgaaattgcgcgaaaccaccccaaacatgagttttggacctaaagtagtggattgggcatgttcgttgcgnnnnnnnnnnnnnnnnnnnnnnnnnnnnnaactcatgctcacccgttttcggaatgggtgacgtgcagtaacgaaattgcgcgaaaccacctcaaacatgagttttggacctaaagttgtggattgggcatgctcgttgcaaaaaacgaagaaacggttccggtggcaaaaactcgtgctttgtatgcaccctgacacccgttttcggaatgggggacgtgcggcaacgaaattgcgcgaaaccaccccaaacataagttttggacctaaagtagtggattgggcatgttcgttgcgaaaaacgaagaattggttccggtggcaaaaactcgtgctttgtatgcaccccgacacccgttttcggaatgggtgacgtgcggcaacgatatagcacgaaaccacccaaacatgagttttggaactaaagtagaggattgggcatgttcattgcgaaaaacgaagaattgcttccggtgtcaaaaactagtgctttatatgcaccccgacacccgttttcggaatgtgtgacgtcccgcaacgaaattgcgcgaaaccaccccaaatatgagtttttacctaaagtagtggattgggcatgttcgttgtgaaaaacgaagaattggttccggtggcgaaaactcgtgctttgtatgcaccccgacacccgttttgggaatgggtgacgtacggcaacgaaattgcgtgaaaccaccccaaacatgagttttggacctaaagtagtggactgggcatgttcgttgtggaaaacgaagatatggttccggtggcgaaaactcatgctttgtatgcacccgacagtcgtttttggaatgggtgacgtgcgacaacgaaattgcgcgaaaccaccccaaacatgagttttggacctaaagtagtggattgggcatgttcgttgcgaaaaacgaagaaatggttcctgtggcaaaaagtcgtgctttgtaccgacacccgttttgggaatgggtgacgtatgatgcggacatcaacaccaacacgagcacatctacaccagcagcaccttctctaccccaggcgccaccccttccaacaccaacacgaggacatcaacaccaacacgaacacacagctcaactccttccagccctgcaccttctacgcctagcactacatcgcgcacagggacgaccaagccagtggcgccccctgccaaaggcgccgcttcttccacaggacgtacacgggatattcagtgccatcgttgcagagggtttggacacatgattcgggactgcccaaacaagcgtaccttgcttatacgtgacaatggtgagtactcttcagctagtgattctgaggaaactagtcatgctatgattgccactaaccatgcagaaaatgaggaagtccacgttgatcccatcgacgccgataggtatgagagtcttgttgtgcagcgtgttctcagcacacaggttgcccaggccgaaaaaaatcagcgacacactctattccataccaagggcgtcgtgcacgaacggtcgattcgcatcatcatcgatagtggcagctgcaacaatttggcaagtacagcgttggtagagaaattatccttgcccactcgcacacatccacatccgtatcacattcaatggcttaatgatggtggtaaaataaaggtaacacgttcggtacgtgtccccttttcgctgggttcttattctgattatgctgattgcgatgttattcctatggaagcatgctctttgttattgggtcgaccttggcaatatgatactgatagtttacatcatggtcgttcaaatcattattctttcatgtttaaaggccagaaaataattatacatccaatgacccctgaccaaattttgaaagatgatcttactagggctactaaaactgcacaacaagtcaaatcgacatcagccgcacctattaaatctgaaatcaagttgcactctcctgttttacttgctactcgtgctgattttgatgatctccatgaagctcatatgccctgttatgcacttgtatgctcgcgcatgcttgttccgcttgatgatgcaccgtctttggatataccccctgctgttgttaaccttttgcaggagtatgctgatgtttttcctacggacttaccaccgggtcttcctcccctccgtggcattgagcatcagatcgatctcatccccggcgcttctcttccgaaccgcgccccgtaccgtacaaatccagaggagacgaaggagatccagcgccaggtgcagacgctgcttgataagggttacattcgtgagtctcttagcccttgctcggttcctgttttactcgttccaaagaaagatgggtcatggcgtatgtgcgtagattgtcgtgctattaataacatcacagttcgttatcgatatcctattccacgccttgatgatatgttagatgagcttagtggtgccgttattttctctaaggttgatttgcgtagcggttaccatcagattagaatgaaactcggtgatgaatggaaaacggcttttaaaacgaaatttggtttatatgaatggttggttatgccatttggattgactaatgctcccagcacctttatgcgtctaatgaacgaagttctacgggccttcataggtttgtttgttgttgtttatttcgatgatatccttatttacagcaagtctatagaggagcatttagaacatttgcgtgctgtttttgatgctttgtgtgctgctcgcttgtttggtaacatggaaaagtgcacattttgcacgcaacgtgtctcgtttcttggttatgtggttactccgcagggcattgagatggatagcagcaagattgctgccattcgggagtggcctacaccgacgacggtcacacaaattcggagctttcttggacttgccggtttctaccgcagatttgttcgtgattttagctccattgcagcgcctctacatgagcttacaaagaaagatgtgccgtttgcttggagtgattcgcaggaggtagcgttcagcactttgaaagataagttaacccaagctcccctcttgcaattgcctgattttaataaagtttttgagcttgaatgcgatgctagcggtattgggctaggtgctgttttgttacaagaaggaaaaccagttgcttattttagtgaaaaattaagcggtgctagtctgaaatattctacttatgataaggagctttacgctttagtgcgcactttgcatacatggcagcactatctttggcatcgtgagttcataattcattctgatcatgaggctttaaaacatattcgtacccaaacaaatctgaaccgtcgtcatgctaaatgggtcgaattcattgagtcctttccttacattattaaacacaagaacgggaaggacaatgttattgctgatgctttgtctcgtcgctataccatgctgtcacaattagattttaaaatctttggtttggacactctgaaggatcaatatgttgacgatgctgattttaaagatgctttcggccattgtattaatgggataccatggggcaaatttcacatacaggatgggttcctgtttcgcgctaacaagctgtgtgttccagctagttcggttcgtcttttgttgttacaggaggcacatggaggcggtctcatggggcattttggcgtctacaaaacacatgaggtgttggctgcccacttcttttggcctcggatgcgcgctgatgttttgagcgccttgttgcacgctgcactacttgtcacaaagctaagtcacggttgaacaaccatggtttgtatatgcctttgcctgtcccttcttctccttggcttgatatctctatggactttgttttgggctt

SEQ ID NO: 743 - DNA, 15230 bp, Zea mays
  source (0)...(0): Zea mays BAC clone full insert sequence contig bacm2.pk174.e4.fis15
cgtaaagctccttatcataagtagaatatttcagactagcaccgcttaatttttcactaaaataagcaactggttttccttcttgtaacaaaacagcacctagcccaataccgctagcatcgcattcaagctcaaaaactttattaaaatcaggcaattgcaagaggggagcttgggttaacttatctttcaaagtgctgaacgctacctcctgcgaatcactccaagcaaacggcacatctttctttgtaagctcatgtagaggcgctgcaatggagctaaaatcacgaacaaatctgcggtagaaaccggcaagtccaagaaagctccgaatttgtgtgaccgtcgtcggtgtaggccactcccgaatggcagcaatcttgctgctatccacctcaatgccctgcggagtaaccacataaccaagaaacgagacacgttgcgtgcaaaatgtgcatttttccatgttaccaaacaagcgagcagcacgcaaagcgtcaaaaacagcacgcaaatgttctaaatgctcctctatagacttgctgtaaataaggatatcatcgaaataaacaacaacaaacaaacctatgaaggcccgtagaacttcgttcattaaacgcataaaggtgctgggagcattagtcaatccaaatggcataaccaaccattcatataaaccaaatttcgttttaaaagccgttttccattcatcaccgagtttcattctaatctgatggtaaccgctacgcaaatcaaccttagagaaaataacggcaccactaagctcatctagcatatcatcaaggcgtggaataggatatcgataacgaactgtgatgttattaatagcacgacaatctacgcacatacgccatgacccatctttctttggaacgagtaaaacaggaaccgagcaagggctaagagactcacgaatgtaacccttatcaagcaacgtctgcacctggcgctggatctccttcgtctcatctggatttgtacggtacggggcgcggttcggaagagaagcgccggggatgagatcgatctgatgctcaatgccacggaggggaggaagacccggtggtaagtccgtaggataaacatcagcatactcctgcaaaaggttaacaacagcagggggtatatccaaagacggtgcatcatcaagcggaacaagcattcgcgagcatacaagtgcataacagggcatatgagcttcatggagatcatcaaaatcagcacgtgtagcaagtaaaacaggagagtgcaacttgatttcagatttaataggtgcggctgatgtcgatttgacttgttgtgcagttttagcagccctagtaagatcatctttcaaaatttggtcaggggtcattggatgtataattattttctggcctttaaacaagaaagaataatgatttgaacgaccatgatgtaaactatcagtatcatattgccaaggtcgacctaataacaaagagcatgcttccataggaataacatcgcaatcagcataatcagaataagaacccagcgagaaggggacacgtaccgaacgtgttacctttattttaccaccatcattaagccattgaatgtgatacggatgtggatgtgtgcgagtgggcaaagataatttctctaccaacgctgtacttgccaaattgttgcagctgccactatcgatgatgatgcgaatcgaccgttcgtgcacgacgcccttggtatggaatagagtgtgtcgctgatttttttcggcctgggcaacctgtgtgctgagaacacgctgcacaacaagactctcatacctatcggcgtcgatgggatcaacgtggacttcctcattttctgcatggttagtggcaatcatagcatgactagtttcctcagaatcactggctgaagagtactcaccattgtcacgtataagcaaggtacgcttgtttgggcagtcccgaatcatgtgcccaaaccctctgcaacgatggcactgaatatcccgtgtacgtcctgtggaagaagcggcgcctttggcagggggtgccactggcttggccggccctgtgcgcgatgtagtgctaggcgtaggaggtgcagggctggaaggagttgagctgtgtgttggaccccggcctgcaaaagagttagtatatgtctttgatcgtcgtccctgcacttcacgttcagctttgcaagcatattcaaacaatgtggttatatcaaaataatccttataatcaagtatatcctgaatttccctgttcaaaccaccacgaaaacgcgccatagcagcgtcatctgactcaaccaaaccacaacgaagcatacccttttgcaactcctggtaatattcctcaacagattgtgaaccttgttgaaaacgctgcattttgttaagcaaatcacgagcataataggaaggaacaaatctgtggcgcatggcagtttttaattgggtccaagtaatgacactgttaatgggaagtttttgtttatactcacgccaccaaattaaagcaaaatcagtaaattcactaatggcagccttcacttggctattagcaggaatatcatggcatgaaaatttctgttctacctctaattcccaatcaagatatgcagcaggatcatatttaccattaaaagatggaattttaaatttaatcttagaaaataagtcattagggggatgacgaaccacacgacgtgcacgaccacggcgatctccatcgtcctgctcagtgtcaccgccgtattcctgctccatctttgtggtcaatgcatcaaggcgtgcaaggatggtgtcgagtgtggtgcgagtcgccgtttgagcaaggtcaagttggttgaaacgctcggtcgtcgaagtgatcgttgaatcaagccgttcatgcatcgtcctaatgtcagcagcaagtccatcaacttgtccccttacttcctgcaactgggcgtccaccatgtcgtgtgctcctgccatagttagcgcaaacaccaaaagaagaaaaaccaacgacaaaaacaggggtgtactgctcacaaggcgctcacactagtgctgttatcaagttcttatccgttcttaccaagccacagtggtgaactgcaatcaacagatggaaccggtgaaagattggatgagcgattgcgtggagaaacagaaacttgcgtgctgtttttgacgctttgcgtgctgctcgcttgtttggtaacatggaaaaatgcacattttgcacgcaacgtgtctcgtttcttggttatgtggttactccgcagggcattgaggtggatagcagcaagattgctgccattcgggagtggcctacaccgacgacggtcacacaaattcggagctttcttggacttgccggtttctaccgcagatttgttcgtgattttagctccattgcagcgcctctacatgagcttacaaagaaagatgtgccgtttgcttggagtgattcgcaggaggtagcgttcagcactttgaaagataagttaacccaagctcccctcttgcaattgcctgattttaataaagtttttgagcttgaatgcgatgctagcggtattgggctaggtgctgttttgttacaagaaggaaaaccagttgcttattttagtgaaaaattaatcggtgctagtctgaaatattctacttatgataaggagctttacgctttagtgcgcactttgcatacttggcagcattatctttggcatcgtgagttcataattcattctgatcatgaggctttaaaacatattcgtacccaaacaaatctgaaccgtcgtcatgctaaatgggtcgaattcattgagtcctttccttacattattaaacacaagaacgggaaggacaatgttattgctgatgctttgtctcgtcgctataccatgctgtcacagttagattttaaaatctttggtttggacactgtgaaggatcaatatgttgacgatgctgattttaaagatgctttcggccattgtattaatgggaaaccatggggcaaatttcacatacaggatgggttcctgtttcgcgctaacaagctgtgtgttccagctagctcggttcgtcttttgttgttacaggaagcgcatggaggcggtctcatggggcattttggcgtctacaagacacatgaggtgttggctgcccacttcttttggcctcggatgcgcgctgatgtggagcgccttgttgcacgctgcactacttgtcagaaagctaagtcacggttgaccaaccatggtttgtatatgcctttgcctgtcccttcttctccttggcttgatatctctatggactttgttttgggcttgcctagaactaagaaggggagggatagtatttttgtggttgttgatagattctctaaaatggctcattttataccttgtcataaaactgatgatgctagcattgttgctgaattgttctttagagaaattattcgtttacatggtattccaaaaacaatagtctctgatcgcgatgctaagtttctaagccatttttggagatctctttggaataaattgggaactaaattattgtttagcactacttgtcaccctcagactgatggacaaactgaggtagtaaatagaactttatctaccatgcttagggctgttttagacaagaatttgagacgttgggaggattgcttgcctcatgttgaatttgcttacaatcatgccacgcattcttctacaaagatgtgccctttccagattgtttatggttacattcctagggcacctattgatttgatttcacttaatgctgcgaacgccccacatgtagatgcttctgcacatgttgaacaaatgattaccatacatgaacaaacgaaacagaacattgctgctactaatacaaaaaatcaggttgctggtagtaaaggaagaaaacatgttacttttgaacctggtgatatggtttggttgcatttgagaaaggatcgttttcctactttgcgccgttctaaattgatgcctcgtgctgctggtccttttaagatactaaccaagattaatgataatgcttataccctcgacctacctgcggagtttggtgtttccactagttttaatgttgcagatttgaaaccgtatgcgggagaagatgaggagttgccgtcgaggacgacttcagttcaagaaggggaggatgatgcggacatcaacaccaacacgagcacatctacaccagcagcaccttctccagcccaggcgccaccccttccacctgggccagtgactcgggcccgtgcaagagaattgaactacatcatgttgttaaagaacgaaggcccggaagaatagacgaccagcccaattgcggcccataatggacgacctagggttggccgcccctaggggctgcgccccctctctatttattcaggagctgtgcctcctttatttcctgagttttgttttacgttagccttagctactctcgaacacgcgcaaatctgcgctgttttcgtgtattcagaactccaccctcgagtaatagattagattgctcgcctctttttcttgttcgttcttcgattgcgcacaggaaacgatcttcgtgatcaggccgatctcgcatcagcaaggtcggtaaccacagggagttggttcagcgattgcattggcgcctcgggcttgctcgtcgtagtcggatcgcaagggtcatcttccgccaaatcggaattatctctactcgccgaaagatcgggcacctcagctacatcacgagtttttgccaccggaaccatttcttcgtttttcgcaacgaacatacacaatccactactttaggtccaaaactcatgtttggggtggtttcgcgcaatttcgttgccacacgtcacccgttccgaaaacgggtgtcgggtgcatacaaagcacgagttttcgccacccgaaccattttttcgtttttcgcaacgaacatgcccaatccactactttaggtccaaaactcatgtttggggtggtttcgcgcaatttcgttgtcgtacgtcaccctttcccaaaacgggagtttttgccaccggaagcaattcttcttttttcgcaatgaacatgcccaatcctttactttaattccaaaactcatgtttggggtggtttcgatatcgttgccgcacgtcacccattccgaaaacgggtgtcgcggtgcatacaaagcacgagtttttgccagcggaaccatttcttcgttttttgcaacgaacatgcccaatccactactttaggtccaaaactcatgtttggggtggtttcgcgcaatttcgttgccgcacgtcacccattccgaaaacgggtgtcgggtgcatacaaagcatgagttttcgccaccggaaccgtttctttgtttttcgcaacgaacatgcccaatgcactactttaggtccaaaactcatgtttggggttgtttcgcgcaatttcgttgtcgtgcgtcacccattcccaaaacgggtgtcggggtgcatacaaagcacgagtttttgccaccggaatcaattcttcgtttttcgcaacgaacatgcccagtcctctacttcaggtccaaaactcgtgtttggggtggtttcgcgctatatcgttgccgcacgtcacccattccgaaaacgggtttcggggtgcatacaaagcacgagttttcgccaccagaaccatttcttcgtttttcgcaacgaacatgcccaatccactactttaggtccaaaactcatgtttggggtggttttgcgcaatttcgttgccgcacgtcacccatttcgaaaacgggtgtcgggtgcatacaaagcacgagttttcgccaccggaaccatttcttcgtttttcgcaacgaacatgcccaatccactacttttggtccaaaactcatgtttggggtggtttcgcgcaatttcgttgtcgtacgtcacccattcccaaaacgggtgttggggtgcatacaaagcacgagtttttgccaccggaaccaattcttcgtttttcgtaacgaacttgcccaatcctctacttcaggtccaaaactcatgtttggggtggtttcgcgctatatcgttgccgcacgtcacccattccgaaaacgggtgtcggggtgcatacaaagcacgtttttttgccaccggaaccatttcttcgtttttcgtaacgaacatacccaatccactactttagttccaaaactcatgtttggggtggtctcgcgcaatttcgttgccgcacgtcacccgttcggaaaacgggtgtcgggtgcatataggggcggtaatggatcacgatccaaatgcttcttcacaaaaacttaaggccctcaaataatattagttcaaaaatgaataagaataaggcccgatcctaatccgattcgacccttaaaatttacagtgtaaagtttatagcccattaccacccctaggtgcatacaaagcacgagttttcaccaccggaaccatttttcgtttttcgcaatgaacatgcccaatccactactttaggtccaaaactcatgtttggggtggtttcgcgcaatttcgttgtcgtacgtcaccctttcccaaaatgggagtttttgccaccggaagcaattcttcgtttttcgcaatgaacatgcccaatcctctactttagatccaaaactcatgtttggggtggtttcgtgctatatcgttgccgcacgtcacccattccgaaaacgggtgtcggggtgcatacaaagcacgagtttttgccaccggaaccatttcttcgtttttcgcaacgaacatgcccaatcctctactttaggtccaaaactcatgtttggggtggttttgcgcaatttcgttgccgcacgtcacccatttcgaaaacgggtgtcgggtgcatacaaagcacgagttttcgccaccggaaccatttcttcgtttttcgcaacgagcatgcccaatccactactttaggtccaaaactcatgtttggggtggtttcgcgcaattacgttgtcgtacgtcacccattcccaaaacgggtgttggggtgcatacaaagcacgagtttttgccaccggaaccaattcttcgtttttcgtaacgaacatgcccaatcctctacttcaggtccaaaactcatgtttggggtggtttcgcgctatatcgttgccgcacgtcacccattccgaaaacgggtgtcggggtgcatacaaagcacgatttttttgccaccggaaccatttcttcgtttttcgcaacgaacatacccaatccactactttaagtccaaaactcaggtttggggtggtttcgcgcaatttcgttgccgcacgtcacctgttccgaaaacgggtgtcgagtgcatacaaagcatgagttttcgccaccggaaccatttcttcgtttttcgcaacgagcatgcccaatccactactttaggtccaaaactcatgtttggggtggtttcgcgcaatttcgttctcgtacgtcaccctttcccaaaacgggtgtcagggtgcatacaaagcacgagtttttgccaccggaagcaattcttcgtttttcgcaatgaacatgcccaatcctctactttagttccaaaactcatgtttggggtggtttcgcgctatatcgttgccgcacgtcacacattccgaaaacgggtgtcgggggtgcatacaaagcacgagtttttgccaccggaaccatttcttcgtttttcgcaacgaacatgcccaatccactactataggtccaaaactcatgtttggggtggtttcacgcaatttcgttgtcgtacgtcacccattcccaaaacgggtgtcggggtgcatacaaagcacaagtttttgccaccggaaccaattcttcgtttttcgcaacgaacatgcccaatcctctactttaggtccaaaactcatgtttggggtggtttcgcgctatatcgttgccgcacgtcaccctttcggaaaacgggtgttggggtgcacacaaagcacgagtttttgccaccggaacaaattcttcgtttttcgcaacgaacatgcccaatcctctactttaggtccaaaactcatgtttggggtggtttcgcactatatcgttgccgcacatcacccattccgaaaacgggtgtcggggtgcatacaaagcacgagtttttgccaccggaaccatttcttcgtttttcgcaacgaacatgcccaatccactaatttaggtccaaaactcatgtttggggtggtttcgcgcaatttcgttgccgcacgtcacccattccgaaaacaggtgtcggggtgcatacaaagcacgagttttcgccaccggaaccaattcttctttttcggaacgaacatgaccaatgcactactttaggtaaaaactcatgtttggggtgatttcgcgcaatttcgttgccgcacgtcacacattccgaaaacgggtgttggggtgcatacaaagcacgagtttttgccaccggaaccaattcttcgtttttcgcaacgaacatgcccaatccactactttaggtccaaaactcatgttttgggtggtttcgcgctattttgttgccgcacgtcacccattccgaaaacgggtgtcgcgtgcatacaaagcatgagatttcgccaccggaatcatttcttcgtttttcacaacgaacatgcccaatccactaatgtaggtccaaaactgatgtttggggtggtttcgcgcaatttcgttatcgtacgtcacccattcccaaaacgggtgtcggggttgcatacaaagcacgagtttttgccaccggaaccaattctttgtttttcgcaacgaacatgcccaatcctctactttaggtccaaaactcatgtttggggtagtttcgcgctatatcgttgccgcacgtcacccattccgaaaacgggtgtcggggtgcacacaaagcatgagttgccaccggaaccaattcttcgtttttcgcaacgaacatgcccaatcctctactttaggtccaaaactcatgttttgggtggttccgtgctatatcgttgccgcacgccacccattccgaaaacaggtgtcggggtgcatacaaagcacgagcttttgccgccggaaccatttcttcgtttttcataacgaacaagcccaatccactactttaggtccaaaactcatgtttggggtggtttcgcgcaatttcgttgccgcacaacacccattccaaaaacgggtgtcgaggtgcatacaaagcacgattttttgccaccgaaaccaattcttcgtttttcgcaacgaacatgcccaatccactactttaggtaaaaactcatgtttgggtggtttcgcgcaatttcgttgccgcacgtcacacaatccaaaaacgggtgttagggtgcatacaaagcacgagtttttgccaccggaaccaattctttgtttttcgcaacgaacatgctcaatcatctactttaggtccaaaactcatgtttgggtgtggtttcgcgctatatcgttgccgcacgtcacccattccgaaaacgggtgttggggtgcatacaaagcacgagtttttaccaccggaaccaattcttcgtttttcgcaacgaacatgcccaatcctctactttaggtccaaaactcatgtttggggtggtttcgcacaatttcgttgtcactcatcacccattccgaaaacgggtgtcgggtgcatacaaagcacgaatttttgccaccagaaccatttcttcgtttttcgcaacgaacatgcccaatccactactttaggtccaaaactcatgtttggggtggtttcacgcaattttgttgtcgtacgtcacccattaccaaaacgggtgtcggggtgcatacaaagcacaagtttttgccaccggaaccaattcttcgtttttcgcaacgaacatgcccaatcctctactttaggtccaaaactcatgtttggggtggtttcgcgctatatcgttgccgcacgtcacccattacgaaaacgggtttcggggtgcatacaaagcacgagttttcgcaccgaaaccatttcttcgtttttcgcaacgaacatgcccattccactactttaggtccaaaactcatgtttggggtggttttgcgcaatttcgttgccgcacgtcgcccatttcgaaaacgggtgtcgtttgcatacaaagcacgagttttcgccaccggaaccatttcttcgtttttcgcaacgagcatgcccaatccactactttaggtccaaaactcatgtttggggtggtttcgcgcaattacgttgtcgtacgtcacccattcccaaaacgggtgttggggtgcatacaaagcacgagtttttgccaccggaaccaattcttcgtttttcgtaacgaacatgcccaatcctctacttcaggtccaaaactcatgtttggggtggtttcgcgctatatcgttgccgcacgtcacccattccgaaaacgggtgtcggggtgcatacaaagcacgatttttttgccaccggaaccatttcttcgtttttcgcaacgaacatacccaatccactactttaagtccaaaactcatgtttggggtggtttcgtgcaatttcgttgccgcacgttgatgtagctgaagtgcccgatctttcggcgagtagagataattccgatttggcggaagttgacccttgcgatccgactacgacgagcaagcccgaggcgccaatgcaatcgctgaaccaactccctgtggttaccgaccttgctaatgcgagatcggcctgatcacgaagatcgtttcctgtgcgcaatcgaagaacgaacaagaaaaagatgcgagcaatctaatctattactcgagggtggagttctgaatacacgaagacagcgcagatttgcgcgtgttcgagagtagctaaagctaatgtaaaacaaaactcggaaaataaaggaggcgcagctcctgaataaatagagagggggcgcagcccctaggggcggccaaccctaggtcgtcaattatgggccgcaattgggctggtcgtctattcttccgggccttcgttctttaacaacatgatgtagttcaattctcttgcacgggcccgagtcactggcccaggtggaaggggtggcgcctgggctggagaaggtgctgctggtgtagatgtgctcgtgttggtgttgatgtccgcatcacacgtcaccctccgaaaacgggtgtcgagtgcatacaaagcacgagttttcgccaccggaaccatttcttcgtttttcgcaacgagcatgcccaatccactactttaggtccaaaactcatgtttggggtggtttcgcgcaatttcgttctcgaacgtcaccctttcccaaaacgggtgtcagggtgcatacaaagcacaagtttttgccaccggaagcaattcttcgtttttcgcaatgaacatgcccaatcctctactttagttccaaaactcatgtttggggtggtttcgcgctatatcgttgccgcacgtcacacattccgaaaacgggtgtcggggtgcatacaaagcacgagtttttgccatcggaaccatttcttcgtttttcgcaacgaacatgcccaatccactactataggtccaaaactcatgtttggggtggtttcacgcaatttcgttgtcgtacgtcacccattcccaaaacgggtgtcggggtgcatacaaagcacaagtttttgccaccggaaccaattcttcgtttttcgcaacgaacatgcccaatcctctactttaggtccaaaactcatgtttggtgtggtttcgcgctatatcgttgccgcacgtcaccctttcggaaaacgggtgttggggtgcatacaaagcacgagtttttgccaccggaacaaattcttcgtttttcgcaacgaacatgcccaatcctctactttaggtccaaaactcatgtttggggtggtttcgcgctatatcgttgccgcacatcacccattccgaaaacggatgtcggggtgcattccgaaaacgggtgtcgggtgcatacaaagcacgagtttttgccaccggaaccatttcttcgttttttgcaacgaacatgcccaatccactactttaggtccaaaactcatgtttggagtggtttcgcgcaatttcgttgtcacatgtcacccattccgaaaacgggtgtcgggtgcataaaagcacgagtttttgccaccggaaccatttcttcgtttttcgcaacgaacatgcccaatccactactttaggtccaaaactcatgtttggggtggttcgcgcaatttcgttgccgcacttcactcattccgaaaacgagtgtcgggtgcataaaaccacgagtttttgccaccggaaccatttcttcgtttttcgtaacgaacatgcccaatccactactttaggtccaaaactcatgtttggggtggtttcgcacaatttcgttgtcgcacgtcacccattcccaaaacgggtgtcgggtgcatacaaagcacgagtttttgccaccggaaccatttcttcgtttttcgcaacgaacatgcccaatccactactttaggtccaaaactcatgtttggggtggtttcgcacaatttcgttgtcgcacgtcacccattcccaaaacgggtgtcgggtgcatacaaagcacgagtttttgccaccggaaccatttcttcgtttttcgcaacgaacatgcccaatccactactttaggtccaaaactcatgtttggggtggtttcgcgcaattttgttgtggcacgtcacccattccgaaaacgggtgtcatggtgcatacaaagcacgagtttttgccaccggaaccatttcttcgtttttcgcaatgaacatgcccaatccactactttaggtacaaaactcatgtttggggtggtttcgcgcaatttcgttgtcacatgtcacccattccgaaaacgggtgtcgggtgcataaaagcacgagtttttgccaccggaaccatttcttcgtttttcgcaacgaacatgcccaatccactactttaggtccaaaactcatgtttggggtggtttcgcgcaatttcgttgtcgcacgtcacccattctgaaaacgggtgttgtggtgcatacaaagcacgagtttttgccaccggaaccatttcttcgtttttcgcaacgaacatgcccaatccactactttaggtccaaaactcatgtttggggtggttcgcgcaatttcgttgccgcacttcactcattccgaaaacgagtgtcgggtgcataaaaccacgagtttttgccaccggaaccatttcttcgtttttcgtaaagaacatgcccaatccactactttaggtccaaaactcatgtttagggtggtttcgcacaatttcgttgttgcacgtcacccattcccaaaacgggtgtcgggtgcatacaaagcacgagtttttgccaccggaaccatttcttcgtttttcgcaacgaacatgcccaatccactactttaggtccaaaactcatgcttggggtggtttcgcacaatttcgttgtcgcacgtcacccattctcaaaacgggtgtcgggtgcatacaaagcacgagtttttgccaccggaaccatttcttcgtttttcgcaacgaacatgcccaatccactactttaggtccaaaactcatgtttggggtggtttcgcgcaattttgttgtcgcacgtcacccattccgaaaacgggtgtcgtggtgcatacaaagcacgagtttttgccaccggaaccatttcttcgtttttcgcaatgaacttgcccaatccactactttaggtacaaaactcatgtttggggtggtttcgcgcaatttcgttgtcacatgtcacccattccgaaaacgggtgtcgggtgcataaaagcacgagtttttgccaccggaaccatttcttcgtttttcgcaacgaacatgcccaatccactactttaggtccaaaactcatgtttggggtggtttcgcgcaatttcgttgtcgcacgtcacccattctgaaaacgggtgtcgtggtgcatacaaagcacgagtttttgccaccggaaccatttcttcgtttttcgcaacgaacatgcccaatcctgatgaggacatcactatgagtacgactacaccagcagcacctccacatcaagcgccacttccttcattagctgggccaatcactcgggcccgtgccagagatcttaactttcgtcatgctactgaagaatgagggcccag

SEQ ID NO: 744 - DNA, 16298 bp, Zea mays
  source (0)...(0): Zea mays BAC clone full insert sequence contig bacm2.pk174.e4.fis16
tagtggatttgatgtagctgaggtgcccgatctttcggcgagtagagataattccgatttggcggaagatgacccttgcgatccgactacgacgagcaagcccgaggcgccaatgcaatcgctgaaccaactccctgtggttaccgaccttgctgatgcgagatcggcctgatcacgaagatcgtttcctgtgcgcaatcgaagaacgaacaagaaaaagaggcgagcaatctaatctattactcgagggtggagttctgaatacacgaagacagcgcagatttgcgcgtgttcgagagtagctaaggctaacgtaaaacaaaactcaggaaataaaggaggcgcagctcctgaataaatagagagggggcgcagcccctaggggcggccaaccctaggtcgtccattatgggcagcaattgggctggtcgtctattcttccgggccttcgttctttaacaacatgatgtagttcaattctcttgcacgggcccgagtcactggcccaggtggaaggggtggcgcctgggctggagaaggtgctgctggtgtagatgtgctcgtgttggtgttgatgtccgcatcaactcgtgcttttatgcactcgacacccgttttcggaatgggtgacgtgcggaaacgaaattgcgcgaaaccaccccaaacatgagttttggacctaaagtagtggattgggcatgttcgttgcgaaaatcgaagaaatggttccggtggcaaaaactcgtgctttgtatgcaccccgacacccgtttttggaatgggtgacgtgcgacaacgaaattgtgcgaaaccaccccaaacatgagttttggacctaaagtagtggattgggcatgttcgttgcgaaaaacgaagaaatggttccggtggcaaaaactcgtgctttgtatgcaccccgacaaccgttttcagaatgggtgacatgcggcaacaaaattgtgcgaaaccaccccaacacatgagttttgtacctaaagtagcggattgggcatgttcgttgcgaaaaacgaagaaatggttccggtggcaaaaactcgtgctttgtgatgaggacatcactatgagtacgactataccagcaacacctccacatcaagcgccacttccttcattagctgggccaatcactcgggcccgtgccagagatcttaacttcgtcatgctactgaagaatgagggcccagaagaatagacgaccagcccaactgcagcccatagtggacgacctagggttggccgccctaggggctgcgccccctctatttatgcaggagctgcgcctcctttattttcgagttttgttttacgttagccttagctactctcgaacacgcgcaaatctgcgctgtcttcgtgtattcagaactccaccctcgagtaatagattagattgctcgcatctttttcttgttcgttcttcgattgcgcacaggaaacgatcttcgtgatcagaccgatctcgcatcagcaaggtcggtaaccacagggagttggttcagcgattgcattggcgcctcgggcttgctcgtcgtagtcggatcgcaagggtcatcttccgccaaatcggaattatctctactcgccgaaagatcgggcacctcagctacatcactttgtatgcaccccgacacccgttttcggaatgggtgacgtgcgacaacgaaattgcgcgaaaccaccccaaacatgagttttggacctaaagtagtggattgggcatgttcgttgcgaaaaacgaagaaatggttccggtggcaaaaactcgtgcttttatgcactcgacacccgttttcggaatgggtgacgtgcggaaacgaaattgcgcgaaaccaccccaaacatgagttttggacctaaagtagtggattgggcatgttcgttgcgaaaatcgaagaaatggttccggtggcaaaaactcgtgctttgtatgcaccccgacacccgtttttggaatgggtgacgtgcgacaacgaaattgcgcgaaaccaccccaaacatgagttttggacctaaagtagtggattgggcatgttcgttgcgaaaaacgaagaaatggttccggtggcaaaaactcgtgctttatgcacccgacacccgatttcggaatgggtgacgtgcgacaacgaaattgtgcgaaaccaccccaaacatgagttttggacctaaagtagtggattggcatgttcgttacgaaaaacgaagaaatagttccggtggcaaaaatcgtgctttgtatgcaccccgacacccgttttcggaatgggtgacgtgcgacaacgaaattgcgcgaaaccaccccaaacatgagttttggacctaatgtagtggatttgatgtagctgaggtgcccgatctttcggcgagtagagataattccgatttggcggaagatgacccttgcgatccgactacgacgagcaagcccgaggcgccaatgcaatcgctgaaccaactccctgtggttaccgaccttgctgatgcgagatcggcctgatcacgaagatcgtttcctgtgcgcaatcgaagaacgaacaagaacaagatgcgagcaatctaatctattactcgagggtggagttctgaatacacgaagacagcgcagatttgcgcgtgttcgagagtagctaaggctaacgtaaaacaaaactcgagaataaaggaggcgcagctcctagataaatagagggggcgcagcccctaggggcagccaaccctaggtcgtccactatgggccgcagttgggctggtcgtctattcttctgggccctcattcttcagtagcatgacgaagttaagatctctagcacgggcccgagtgattggcccagctaatgaaggaagtggcgcttgatgtggaggtgctgctggtgtagtcgtactcatagtgatgtcctcatcatcctccccttcttgaagtgaagtcgtcctcgacgacaactcctcatcctcggccatatatggtttcaaatctgcaacattaaaactagtggaaacactaaattccgcaggcaggtcaaggatataagcattatcattaatctttgttagcaccttaaaaggaccagcagcacgaggcattaatttagaacgacgcaaagtaggaaaccgatcctttctcaagtgcaaccaaaccatatcacctggctcaaaagtaacatgttttcttcctttactaccagcaacctgatttttagcattagtagcagcaatgttctgtttcgtttgttcatgtatggtaatcatttgttcaacatgtgcagcagcatctacatgtggggcgttcgcagcattaagtgaaatcaaatcaataggtgccctagggatgtaaccataaacaatctggaaagggcacatctttgtagaagaatgcgtggcacgattgtaagcaaattcaacatgaggcaagcaatcctcccaacgtctcaaattcttgtctaaaacagccctaagcatggtagataaagttctatttactacctcagtttgtccatcagtctgagggtgacaagtagtgctaaacaacaatttagttcccaatttattccaaagagatctccaaaaatggcttagaaacttggcatcgcgatcagagactattgtttttggaataccatgtaaacgaataatttctctaaagaacaattcagcaacaatgctagcatcatcagttttatgacaaggtataaagtgagccattttagagaatctatcaacaaccacaaaaatactatccctccccttcttagttctaggcaagcccaaaacaaagtccatagagatatcaagccaaggagaagaagggacaggcaaaggcatatacaaaccaaggttgttcaaccgtgacttagctttctgacaagtagtgcaacgtgcaacaaggcgctccacatcagcgcgcatccgaggccaaaagaaatgggcagccaacacctcatgcgttttgtagacgccaaaatgccccatgagaccgcctccatgcgcttcctgtaacaacaaaagacgaaccgagctagctggaacacacagcttgttagcgcgaaacaggaacccatcctgtatgtgaaatttgccccatggtatcccattaatacaatgggcgaaagcatctttaaaatcagcttcgtcaacatattaatccttcacagtgtccaaaccaaagattttaaagtctaattgtgacagcatggtatagcgacgagacaaagcatcagcaataacattgtccttcccgttcttgtgtttaataatgtaaggaaaggactcaatgaattcgacccatttagcatgacgacggttcagatttgtttgggtacgaatatgttttaaagcctcatgatcagaatgaattatgaactcatgatgccaaagatagtgctgccaagtatgcaaagtgcgcactaaagtgtaaagctccttatcataagtagaatatttcagactagcaccgcttaatttttcactaaaataagcaactggttttccttcttgtaacaaaacagcacctagcccaataccgctagcatcgcattcaagctcaaaaactttattaaaatcaggcaattgcaagaggggagcttgggttaacttatctttcaaagtgctgaacgctacctcctgcgaatcactccaagcaaacggcacatctttctttgtaagctcatgtagaggcgctgcaatggagctaaaatcacgaacaaatctgcggtagaaaccggcaagtccaagaaagctccgaatttgtgtgaccgtcgtcggtgtaggccactcccgaatggcagcaatcttgctgctatccacctcaatgccctgcggagtaaccacataaccaagaaacgagacacgttgcgtgcaaaatgtgcacttttccatgttaccaaacaagcgagcagcacgcaaagcgtcaaaaacagcacgcaaatgttctaaatgctcctctatagacttgctgtaaataaggatatcatcgaaataaacaacaacaaacaaacctatgaaggcccgtagaacttcgttcattaaacgcataaaggtgctgggagcattagtcaatccaaatggcataaccaaccattcatataaaccaaattttgttttaaaagccgttttccattcatcaccgagtttcattctaatctgatggtaaccgctacgcaaatcaaccttagagaaaataacggcaccactaagctcatctagcatatcatcaaggcgtggaataggatatcgataacgaactgtgatgttattaatagcacgacaatctacgcacatacgccatgacccatctttctttggaacgagtaaaacaggaaccaagcaagggctaagagactcacgaatgtaacccttatcaagcagcgtctgcacctggcgctggatctccttcgtctcatctggatttgtacggtacggggcgcggtttggaagagaagcgccggggatgagatcgatctgatgctcaatgccacggaggggaggaagacccggtggtaagtccgtaggataaacatcagcatactcctgcaaaaggttaacaacagcaggggtatatccaaagacggtgcatcatcaagcggaacaagcattcgcgagcatacaagtgcataacagggcatatgagcttcatggagatcatcaaaatcagcacgtgtaccaagtaaaacaggagagtgcaacttgatttcagatttaataggtgtggctgatgtcgatttgacttgttgtgcagttttagcagctctagtaagatcatctttcaaaatttggtcaggggtcattggatgtataattattttctggcctttaaacatgaaagaataatgatttgaacgaccatgatgtaaactatcagtatcatattgccaaggtcgacctaataacaaagagcatgcttccataggaataacatcgcaatcagcataatcagaataagaacccagcgaaaaggggacacgtaccgaacgtgttacctttattttaccaccatcattaagccattgaatatgatacggatgtggatgtgtgcgagtgggcaaggataatttctctaccaacgctgtacttgccaaattgttgcagctgccactatcgatgatgatgcgaatcgaccgttcgtgcacgacgcccttggtatggaatagagtgtgtcgctgatttttttcggcctgggcaacctgtgtgctgagaacacgctgcacaacaagactctcatacctatcggcgtcgatgggatcaacgtggacttcctcattttctgcatggttagtggcaatcatagcatgactagtttcctcagaatcactagctgaagagtactcaccattgtcacgtataagcaaggtacgcttgtttgggcagtcccgaatcatgtgcccaaaccctctgcaacgatggcactgaatatcccgtgtacgtcctgtggaagaagcggcgcctttggcagggggcgccactggcttggtcgtccctgtgcgcgatgtagtgttaggcgtagaaggtgcagggctggaaggagttgagctgtgtgttggaccccggcctgcaaaagagttagtatatgtctttgatcgtcgtccctgcacttcacgttcagctttgcaagcatattcaaacaatgtggttatatcaaaataatccttataatcaagtatatcctgaatttccctgttcaaaccaccacgaaaacgcgccatagcagcgtcatcggactcaaccaaaccacaacgaagcatacccttttgcaactcctggtaatattcctcaacagattgtgaaccttgttgaaaacgctgcattttgttaagcaaatcacgagcataataggaaggaacaaatctgtggcgcatggcagtttttaattgggtccaagtaatgacactgttaatgggaagtttttgtttatactcacgccaccaaattaaagcaaaatcagtaaattcactaatggcagccttcacttggctattagcaggaatatcatggcatgaaaatttctgttctacctccaattcccaatcaagatatgcagcaggatcatatttaccattaaaagatggaattttaaatttaatcttagaaaataagtcattagggggatgacgaaccacacgacgtgcacgaccacggcgatctccatcgtcctgctcagtgtcaccgccgtattcttgctccatctttgtggtcaatgcatcaaggcgtgccaggatggtgtcgagtgtggtgcgagtcgccgtttgagcaaggtcaagttggttgaaacgctcggtcgtcgaagtgaccgttgaatcaagccgttcatgcatcgttctaatttcagcagcaagtccatcaacttgtcccctgacttcctgcaactgggcatccaccatgtcgtgtgctcctgccatagttagcgcaaacaccaaaacaccaaaaggagaaaaaccaacgacaaaaacaggggtgtactgctcacaaggcgctcacactagtgctgttatcaagttcttatccgttcttaccaagccacagtggtgaactgcaaccaacaggtggaaccggtgaaagattggattagcgattgcatggagaaacagaaaccttctcgtcgtagaaatatgtggagttttgggtaggctgcactcaagtcaaggattagcacgatcaaacaataatgcaaagttgaattatagtgcaaaacacgaaactatattgctggccacaagtgcaaaggacggatggaactagcagaatggcagtaccgtaaatattgtactagcgaggccactagtaggaatcacaagtgattttgtttttcttttttttgtatgatttttttgatatttttctcagcacaagaagcaacaaaataggagctacacgaagtttcacctaaagcagaaatcagatgtggtctacagaaaatcaggaagttctctaaaaagcgtgcgagaactttgacgaatttttttctttattttcctgaatttttttgacaattttgtcgaaaccaaacagaccgaatggtgtcaacaagctcctgtaaaaatttcagattttttggacacccgagcgaaaagttatgcccgttttacggaaaacgaccggaatgaaacaaccgtatcctttctccttcgttttctttttttttgtttctgttttttttgagtaaccgaaggagaaaaacaaggaagcggttgttgactcggtttgttttttttttcctattttttttcgtaaccgagggagaaaaacaaggaaacggccgttgactcggtttgttttttctgttttctttttgacgtaaccgaaggagaaaaacaaggagacgatgttgactcggtttgtggcgtgatcaaacgggagatggtggcggcgctaggatttgaatggtggaagaacacaatgcaaccagcaacaaggaaacgcgaaagcacacaaattcaacaatgcagattattgaaagaaagtgcgaggctcaaaagggtgctgggataagatctaacctgaatttttatgtggttttgtggactgtaggaaaaaatgctcgataaactcaccgatcaacctggaaatctgataccaattgatgtagctgaggtgcccgatctttcggcgagtagagataattccgatttggcggaagatgacccttgcgatccgactacgacgagcaagcccgaggcgccaatgcaatcgctgaaccaactccctgtggttaccgaccttgctgatgcgagatcggcctgatcacgaagatcgtttcctgtgcgcaatcgaagaacgaacaagaacaagatgcgagcaatctaatctattactcgagggtggagttctgaatacacgaagacagcgcagatttgcgcgtgttcgagagtagctaaggctaacgtaaaacaaaactcgagaataaaggaggcgcagctcctagataaatagagggggcgcagcccctaggggcggccaaccctaggtcgtccactatgggccgcagttgggctggtcgtctattcttctgggccctcattcttcagtagcatgacgaagttaagatctctggcacgggcccgagtgattggcccagctaatgaaggaagtggcgcttgatgtggaggtgctgctggtgtagtcgtactcatagtgatgtcctcatcaggattgggcatgttcgttgcgaaaaacgaagaaatggttccggtggcaaaaactcgtgctttgtatgcaccacgacacccgttttcagaatgggtgacgtgcgacaacgaaattgcgcgaaaccaccccaaacatgagttttggacctaaagtagtggattgggcatgttcgttgcgaaaaacgaagaaatggttccggtggcaaaaactcgtgcttttatgcacccgacacccgttttcggaatgggtgacatgtgacaacgaaattgcgcgaaaccaccccaaacatgagttttgtacctaaagtagtggattgggcaagttcattgcgaaaaacgaagaaatggttccggtggcaagaactcgtgctttgtatgcaccatgacacccgttttcggaatgggtgacgtgcgacaacgaaattgcgcgaaaccaccccaaacatgagttttggacctaaagtagtggattgggcatgttcgttgcgaaaaacgaagaaatggttccggtggcaaaaactcgtgctttgtatgcacccgacacccgttttcggaatgggtgacgtgcgacaacgaaattgcgcgaaaccaccccaaacatgagttttggacctaaagtagtggattgggcatgttcgttgcgaaaaacgaagaaatggttccggtggcaaaaactcgtgctttgtatgcacccgacacccgttttgggaatgggtgacgtgcgacaacgaaattgtgcgaaaccaccccaaacatgagttttggacctaaagtagtggattgggcatgttcgttacgaaaaacgaagaaatggttccggtggcaaaaactcgtggttttatgcacccgacactcgttttcggaatgagtgaagtgcggcaacgaaattgcgcgaaccaccccaaacatgagttttggacctaaagtagtggattgggcatgttcgttgcgaaaaacgaagaaatggttccggtggcaaaaactcgtgcttttatgcacccgacacccgttttcggaatgggtgacatgtgacaacgaaattgcgcgaaaccaccccaaacatgagttttgtacctaaagtagtggattgggcatgttcgttgcgaaaaacgaagaaatggttccggtggcaaaaactcgtgctttgtatgcaccacgacacccgttttcggaatgggtgacgtgcgacaacgaaattgcgcgaaaccaccccaaacatgacttttggacctaaagtagtggattgggcatgttcgttgcgaaaaacgaagaaatggttccggtggcaaaaactcgtgctttgtatgcacccgacacccgttttcggaatgggtgacgtgcgacaacgaaattgcgcgaaaccaccccaaacatgagttttggacctaaagtagtggattgggcatgttcgttgcaaaaaacgaagaaatggttccggtggcaaaaactcgtgctttgtatgcacccgacacccgttttcggaatgggtgacgtgcgacaacgaaattgcgtgaaaccaccccaaacatgagttttggacctaaagtagtggattaggcatgttcgttacgaagaacgaaatttcagattttttggacacccgagcgaaaagttatgcccgttttacggaaaacgaccggaatgaaacaaccgtatcctttctccttcgttttctttttttttgtttctgttttttttggacacccgagcgaaaagttatgcccgttttacggaaaacgaccggaatgaaacaaccgtatcctttctccttcgttttctttttttttgtttctgttttttttttgagtaaccgaaggagaaaaacaaggaagcagttgttgactcggtttgttttttttttcctattttttttcgtaaccgagggagaaaaacaaggaaacggccgttgactcggtttgttttttctgttttctttttgacgtaaccgaaggagaaaaacaaggagacgatgttgactcggtttgtggcgtgatcaaacgggagatggtggcggcgctaggatttgaatggtggaagaacacaatgcaaccagcaacaaggaaacgcgaaagcacacaaattcaacaatgcagattattgaaagaaagtgcgaggctcaaaagggtgctgggataagatctaacctgaatttttatgtggttttgtggactgtaggaaaaaacgctcgataaactcaccgatcaacctggaaatctgataccaattgatgtagctgaggtgcccgatctttcggcgagtagagataattccgatttggcggaagatgacccttgcgatccgactacgacgagcaagcccgaggcgccaatgcaatcgctgaaccaactccctgtggttaccgaccttgctgatgcgagatcggcctgatcacgaagatcgtttcctgtgcgcaatcgaagaacgaacaagaacaagatgcgagcaatctaatctattactcgagggtggagttctgaatacacgaagacagcgcagatttgcgcgtgttcgagagtagctaaggctaacgtaaaacaaaactcgagaataaaggaggcgcagctcctagataaatagagggggcgcagcccctaggggcggccaaccctaggtcgtccactatgggccgcagttgggctggtcgtctattcttctgggccctcattcttcagtagcatgacgaagttaagatctctggcacgggcccgagtgattggcccagctaatgaaggaagtggcgcttgatgtggaggtgctgctggtgtagtcgtactcatagtgatgtcctcatcaggattgggcatgttcgttgcgaaaaacgaagaaatggttccggtggcaaaaactcgtgctttgtatgcaccacgacacccgttttcagaatgggtgacgtgcgacaacgaaattgcgcgaaaccaccccaaacatgagttttggacctaaagtagtggattgggcatgttcgttgcgaaaaacgaagaaatggttccggtggcaaaaactcgtgcttttatgcacccgacacccgtttttggaatgggtgacatgtgacaacgaaattgcgcgaaaccaccccaaacatgagttttgtacctaaagtagtggattgggcaagttcattgcgaaaaacgaagaaatggttccggtggcaaaaactcgtgctttgtatgcaccacgacacccgttttcggaatgggtgacgtgcgacaacaaaattgcgcgaaaccaccccaaacatgagttttggacctaaagtagtggattgggcatgttcgttgcgaaaaacgaagaaatggttccggtggcaaaaactcgtgctttgtatgcacccgacacccgttttgggaatgggtgacgtgcgacaacgaaattgtgcgaaaccaccccaagcatgagttttggacctaaagtagtggattgggcatgttcgttgcgaaaaacgaagaaatggttccggtggcaaaaactcgtgctttgtatgcacccgacacccgttttgggaatgggtgacgtgcgacaacgaaattgtgcgaaaccaccctaaacatgagttttggacctaaagtagtggattgggcatgttcattacgaaaaacgaagaaatggttccggtggcaaaaactcgtggttttatgcacccgacactcgttttcggaatgagtgaagtgcggcaacgaaattgcgcgaaccaccccaaacatgagttttggacctaaagtagtggattgggcatgttcgttgcgaaaaacgaaaaaatggttccggtggcaaaaactcgtgctttgtatgcaccacgacacccgttttcagaatgggtgacgtgcgacaacgaaattgcgcgaaacccccccaaacatgatttttggacctaaagtagtggattgggcatgttctttgcaaaaaacaaaaaaatggttccggtggcaaaaactcgtgcttttatgcaccccacacccgttttcggaatgggtgacatgtgacaacaaaattgcgcgaaaacccccccaaacatgagttttgtacctaaaataatggataggggatgttcgttgcgaaaaacgaaaaaatggttcctgtggcaaaaactcgtgctttgtatgcaccatgacacccgttttgggaatgggtgacgtgcgacaaggaaatttgcgcgaaaccacccctaacttgagttttggacttaaatcctttgattgggcatttttgttacgaaaaacgaagaaatggtttcggtggcaaaaattggtgtttttatgcaccccgacacccgttttcggaatgggtgacgtgggacaacgaaattgcgcgaaaccaccccaaacatgagttttggacctaaagtagtggattgggcatgttcgttgcgaaaaacgaagaaatggtttcggtggcaaaaactcgtgcttttatgcactcgacacccgttttcggaatgggtgacgtgcggaaacgaaattgcgcgaaaccaccccaaacatgagttttggacctaaagtattggattgtgatgcggacatcaacaccaacacgagcacatctacactagcagcaccttctccagcccaggcgccaccccttccacctgggccagtgactcgggcccgtgcaagagaattgaactacatcatgttgttaaagaacgaaggcccggaagaatagacgaccagcccaattgcggcccataatggacgacctagggttggccgcccctaggggctgcgccccctctctatttattcaggagctgcgcctcctttatttcctgagttttgttttacgttagccttagctactctcgaacacgcgcaaatctgcgctgtcttcgtgtattcagaactccaccctcgagtaatagattagattgctcgcatcttgttcttgttcgttcttcgattgcgcacaggaaacgatcttcgtgatcaggccgatctcgcatcagcaaggtcggtaaccacagggagttggttcagcgattgcattggcgcctcgggcttgctcgtcgtagtcggatcgcaagggtcatcttccgccaaatcggaattatctctactcgccgaaagatcgggcacctcagctacatcaattggtatcagatttccaggttgatcggtgagtttatcgagcgttttttcctacagtccacaaaaccacataaaaattcaggttagatcttatcccagcacccttttgagcctcgcactttctttcaataatctgcattgttgaatttgtgtgctttcacgtttccttgttgctggttgcattgtgttcttccaccattcaaatcctagcgccgccaccatctcccgtttgatcacgccacaaaccgagtcaacatcgtctccttgtttttctccttcggttacgtcaaaaagaaaacagaaaaaacaaaccgagtcaacggccgtttccttgtttttctccctcggttacgaaaaaaaacaggaaaaaaaaaacaaaccgagtcaacaaccgcttccttgtttttctccttcggttactcaaaaaaaaacagaaacaaaaaaaaaagaaaacgaaggagaaaggatacggttgtttcatgatgcggacatcaacaccaacacgagcacatctacaccagcagcaccttctccagcccaggcgccaccccttccacctgggccagtgactcgggcccgtgcaagagaattgaactacatcatgttgttaaagaacgaaggcccggaagaatagacgaccagcccaattgcggcccataatggacgacctagggttggccgcccctaggggctgcgccccctctctatttattcaggagctgcgcctcctttatttccgagttttgttttacattagctttagctactctcgaacacgcgcaaatctgcgctgtcttcatgtattcagaactccaccctcgagtaatagattagattgctcgcatctttttcttgttcgttcttcgattgcgcacaggaaacgatcttcgtgatcaggccgatctcgcatcagcaaggtcggtaaccacagggagttggttcagcgattgcattggcgcctcgggcttgctcgtcgtagtcggatcgcaagggtcaacttccgccaaatcggaattatctctactcgccgaaagatcgggcacctcagctacatcaattggtatcagatttccaggttgatcggtgagtttatcgagcgttttttttcctacagtccacaaaaccacataaaattcaggttagatcttatcccagcacccttttgagcctcgcactttctttcaataatctgcattgttgaatttgtgtgctttcacgtttccttgttgctggttgcattgtgttcttccaccattcaaatcctagcgccgccaccatctcccctttgatcacgccacaaaccgagtcaacattgtttccttgtttttctccttcggttacgtcaaaaaaaacagaaaaaacaaaccgagtcaacggccgtttccttgtttttctccttcggttacgaaaaaaaaacagaaaaaaaaaccgagtcaacatcgtttccttgtttttctccttcggttacgtcaaaaaaaaaaaacagaaacaaaaaacaacgaaggagaaaggatacggttgtttcatcccggtcgtttgaaaacataacttgaggtaccttccttaaaccgggcataacttttcgctcgggtgtccgaaaaatctgaaatttttacaggagctagttgacaccattctgaggccggccaaactcacctacggtctgtttggggttcgacaaaattgtcaaaaaaattcaggaaaataaagaaaaaaatccgtcaaagttctcgcacgcttttcagagaacttcctgattttctgtagaccacatctgatatctgttttaggtgaaacttcgtgtagcttctatcttgttgcttcttgtgctgagaaaaatatcaaaaaaatcatacaaaaaagaaaaacaaaatcacctgtgatttctactagtgcctttttggcatcactagtacaatatttacggtactgccattctgctagttccatccatcctttgcacctgtggccagcaatatagtttcgtgttttgcactataattcaactttgcattattgtttgatcgtgctaatccttgacttgagtgcagcctacccaaaactc

SEQ ID NO: 745 - DNA, 819 bp, Zea mays
  source (0)...(0): Zea mays BAC clone full insert sequence contig bacm.pk135.l06.fis1
  misc_feature (1)...(819): n = A,T,C or G
acatcgcgcatagnnnnnnnnnnnnnnnnnnnnnnnnnnnnnnnnnnnnnnnnnnnnnnnnnnnnnnnnnnnnnnnnnnnnnnnnnnnnnnnnnnnnnnnnatcgaccgttcgtgcacgacgcccttggtatggaatagagtgtgtcgctgatttttttcggcctgggcaacctgtgtgctgagaacacgctgcacaacctgtctcttatacacatctcaaccctgaagctcttgttggctagtgcgtagtcgttggcaagctctagaggatccccacggcttcccgtgggacgtgtagcagcacgcaagcacttctcaatgcagcaggcacaggatgcccgcacgaacgatgggacacgggcgccgggagtcggctgcacggcagcgggggtcctccaagcagtcacgggtccaagacaactcatgcgccagcgtagccgctacggtcgagccatccaaagcatccctccgcgctgggcgcggcgggtctacttgcgaggacggcgaccgaaggtccaccgagcacgggagaaatggaaaacgcatcgagcaacgggccatcccacagtgcagccactcgtccagggctgggcgcggtagggtgctgaccggccacggctaggccgcgagggggtgcggggctcggccgaggagacctggaggagacgctggaaacgctatggtttcagcagcgttccgcccgggtttcggctgcacgagttccctaccccctactatacctgaggggcataccccctcccaggacttcggggagttcagccttcagaaaaccagggtattttccctggacgccacga

SEQ ID NO: 746 - DNA, 821 bp, Zea mays
  source (0)...(0): Zea mays BAC clone full insert sequence contig bacm.pk135.l06.fis2
  misc_feature (1)...(821): n = A,T,C or G
acgtcgcgcatagnnnnnnnnnnnnnnnnnnnnnnnnnnnnnnnnnnnnnnnnnnnnnnnnnnnnnnnnnnnnnnnnnnnnnnnnnnnnnnnnnnnnnnnncatacccaatccactactttaggtccaaaactcatgtttagggtggtttctcgcaatttcgttgtcacacgtcacccattccgaaaatgggtgtcgggtgcatacaaagcacgagtttttgccaccggaaccatttcttcgtttttcgcaacgaacatgcccaatccactactttaggtccaaaactcatgtttggggtggtttcgcgcaatttctttgccgcacgtggtcatttctaaaaacggtgtcggggtgcctacaatttccgaatttttgcccccaatccactagatgtggtccaaaacacaggtttggggtggtttcgcgcaatttcgatgccacccgtggccctttggaaaatggcggaatgggtgtgtcccaagaccaagtttttgcaccaagaaagatttggtcgttttaagaaacgaacatgcccaatccactaacttaagtccaaaaactatgtttgaggtgggtttgcacaatttatttgccccaggtcgtcgaagatgaaaaatacgggtgaggggtgtgtaagaccaaaatttttgacaaccagaacctttgcttcttttctagtcgttgaggtcgcctatctgttacattaggcaaaaaaaattaagatttgagggtgttccgcacaaattacttcgtcaacctcccatacatcacagacaaagagagtcgggtacaaaaagaacaaaaagttcggggtgcgag

SEQ ID NO: 747 - DNA, 821 bp, Zea mays
  source (0)...(0): Zea mays BAC clone full insert sequence contig bacm.pk135.l06.fis3
  misc_feature (1)...(821): n = A,T,C or G
gatggatnnnnnnnnnnnnnnnnnnnnnnnnnnnnnnnnnnnnnnnnnnnnnnnnnnnnnnnnnnnnnnnntggttccagtggcaaaaactcgtgctttgtgtgcacccgacacccgttttcggaatgggtaacgtgcgacaacgaaattgtgcgaaaccaccccaaacatgagttttggacctaaagtagtggattgggcatgttcattgcgaaaaacaaagaaatggttccggtggcaaaaactcgtgctttgtatgcacccgacacccgttttcggaatgggtgacgtgcgacaacgaaatcgcgagaaatcaccccaaacatgagttttggacctaaagtagtggattgggcatgttcgttacgaaaaacgaagaaatggttccggtggcaaaaactcgtgctttgtatgcaccccgacacccgttttcggaatgggtgacgtgcgacaatgaaattgcgcgaaaccaccccaaacatgagttttgtacctaaagtagtggattgggcatgttcgttgcgaaaaacaaaaaaatggttccggtggcaaaaactcgtgctttgtatgcacccccaacaacctttatcgaaatgggtgacgtgcggcaacaaaattgcgcgaaacccccccaaacatgatttttggacctaaagtagtggattgggcatgttcgttgcgaaaaacgaaaaaatggttccagtggcaaaaactcgtgctttgtatgcacccgacacccgttttcggaatgggtgacgtgcgacaatgaaattgtgcgaaaccaccccaaacatgagttttggatgtaaagtagtggattg

SEQ ID NO: 748 - DNA, 827 bp, Zea mays
  source (0)...(0): Zea mays BAC clone full insert sequence contig bacm.pk135.l06.fis4
  misc_feature (1)...(827): n = A,T,C or G
acaaagtctgtaatgcagctannnnnnnnnnnnnnnnnnnnnnnnnnnnnnnnnnnnnnnnnnnnnnnnnnnnnnnnnaagtggtaaccttgagaagtgcacattttgcaccgatcgagtttcgtttcttggttatgttgtgactccacagggaattgaggttgatcaagccaaggtagaagcgatacatggatggcctatgccaaagactatcacacaggtgcggagtttcctaggacttgctggcttctatcgccgttttgtgaaggactttagcaccattgctgcacctttgaatgagcttacgaagaagggagtgcattttagttggggcaaagtacaagagcacgctttcaacgtgctgaaagataagttgacacatgcacctctcctccaacttcctgattttaataagacttttgagcttgaatgtgatgctagtggaattggattgggtggtgttttgttacaagaaggcaaacctgttgcatattttagtgaaaaattgagtgggtctgttctaaattattctacttatgataaggaattatatgctcttgtgcgaacattagaaacatgacagcattatttgtggcccaaagagtttgttattcattctgatcatgaatctttgaaacatattcgtagtcaaggaaaactgaaccgtagacatgctaagtgggttgaatttatcgaatcgtttccttatgttattaagcacaagaaaggaaaagagaatatcattgctgacgctttgtctaggagatatactttgctgaatcaacttgactacaaaatctttggattagagacgattaaagaccaat

SEQ ID NO: 749 - DNA, 217 bp, Zea mays
  source (0)...(0): Zea mays BAC clone full insert sequence contig bacm.pk135.l06.fis5
ccctaaaccctaaaccctaaaccctaaaccctaaaccctaaaccctaaaccctaaaccctaaaccctaaaccctaaaccctaaaccctaaaccctaaaccctaaaccctaaaccctaaaccctaaaccctaaaccctaaaccctaaaccctaaaccctaaaccctaaccctaaccctaaccctaaccctaaaccctaagggcgaattcgatatcaag

SEQ ID NO: 750 - DNA, 1133 bp, Zea mays
  source (0)...(0): Zea mays BAC clone full insert sequence contig bacm.pk135.l06.fis6
gaaaccaacctaaacatgagttttggacctaaagtagtggactgggcatgttcgttgcgaaaaacgaagaaatggttccggtggcaaaaactcgtgcttttatgcacccgatacccgttttcagaatgggtgacgtgcgacaacgaaattgcgcgaaaccacctcaaacatgagttttggacctaaagtagtgaattgggcatgttcgttgcgaaaaacgaagaaatggttccggtggcaaaaactcgtgctttgtatgcaccccgacaaccgttttcggaatgggtaacgtgcgacaacgaaattgtgcgaaaccaccccaaacatgagttttgtacctaaagtagtggattgggcatgttcgctacaaaaaacgaaaaaatggttccggtggcaaaaactcgtgcttttatgcaccccgatacccgttttcagaatgtgtgacgtgcgacaacgaaattgcgagaaactaaacatgagttttggacctaaagtagtggattgggcatgttcgttgcgaaaaacgaagaaatggttccggtggcaaaaactcgtgctttgtatgcaccccgacaaccgttttcggaatgggtgacgtgcggcaacgaaattgcgcgaaaccaccccaaacatgagttttggacctaaagtagtggattgggcatgttcgttgcgaaaaacgaagaaatggttccggtggcaaaaactcgtgctctgtatgcaccgacacccgtttttggaatgggtgacgtgcaacaacgaaattgtgcgaaaccaccccaaatatgagttttggacctaaagtagtggatttggcatgttcgttacgataaacgaagaaatggttccggtggcaaaaactcgtgcttttatgcacccgacactcgttttcggaatgagtgacgtgcgacaacgaaattgcgcgaaaccacccgaaacatgagttttgtacctaaagtagtggattgggcatgttcgttgcgaaaaacttagaaatagttccggtggcaaaaactcgtgctttgtatgcaccccgacaaccgttttcagaatgggtgacgtgcggcaacgaaattgcgtgaaaccaccccaaacatgagttttggacctaaagtactggattgggcatgccc

SEQ ID NO: 751 - DNA, 815 bp, Zea mays
  source (0)...(0): Zea mays BAC clone full insert sequence contig bacm.pk135.l06.fis7
gagttttgttttacgttagccttagctactctcgaacacgcgcaaatctgcgctgtcttcgtgtattcagaattccaccctcgagtaatagattagattgcttgcatctttttcttgttcgttcttcgattgcgcacaggaaacgatcttcgtgatcaggccgatctcgcatcagcaaggtcggtaaccacagggagttggttcagcgattgcattggcgcctcgggcttgctcgtcgtagtcggatcgcaagggccatcttccgccaaatcggaattatctctactcgccgaaagatcgggcacctcagctacatcatgcaccccgacacccgttttcggaatgggtgacgtgcgacaacgaaattgtgcgaaaccaccccaaacatgagttttggacctaaagtagtggattgggcatgttcgttgcgaaaaacgaaggaatggttcctgatgaggacatcactatcattgatacaaccataccagtgaccacttcaccattcgtagctaatcaaggaccaatgacacgagcccgtgcacgtaaacttaattatcaggtgaactcgttctttgctattgaagctaattcttctttaaatgaggtactaaagccttgcaatgactttattatgctcaggtgtttgggaggtgaaccatcttggattggagaaggcaacaaggcaataaaggctgctgcacccgagaggatttcgtaacagcacaagtacaagtttaaatggggcatatcttccaacttccaaggccgtttaatgcaaataaatacttgttggaaagctcccttcgtctacttgc

SEQ ID NO: 752 - DNA, 1941 bp, Zea mays
  source (0)...(0): Zea mays BAC clone full insert sequence contig bacm.pk135.l06.fis8
caatctttaggtccaaaactcatgtttggggtggtttcgcgcaatttcgttgccgcacgtcacccattctgaaaacggttgtcggggtgcatacaaagcacgatttttgccaccggaaccatttcttcgtttttcgcaacgaacatgcccaatccactactttaggtccaaaacccatgtttggggtggtttcgcgcaatttcgttgccgcacgtcactcattccgaaaacgagtgtcgggtgcataaaagcacgagtttttgccaccggaaccatttcttcgtttttcgtaacgaacatgcccaatccactactttaggtccaaaactcatgtttggggtggtttcgcgcaatttcgttgccgcacgtcacccattctaaaaacggttgtcgggggtgcatacaaagcacgagtttttgccaccggaaccatttatagtttttcgcaacgaacatgcccaacccactactttaggtccaaaactcatgtttggggtggtttcgcgcaatttcgttgccgcacgtcacccattctgaaaacggttttcggtacaaagcacgagttttttgccaccggaaccatttcttcgtttttcgcaacgaacatgcccaatccactactttaggtacaaaactcatgtttggggtggtttcgcgcaatttcgttgctgcacgtcactcattccgaaaacgagtgtcgcgtgcatacaaagcacgagtttttgccaccggaaccatttcttcgtttttcgcaacgaatatgcccaatccactacttcaggtccaaaactcatgtttggggtggtttcgcgcaatttcgttgccgcacgtcacccattccgaaaacggttgtcgggggtgcatacaaagcacgagtttttgccaccggaaccatttcttcgtttttcgcaacggacatgcccaatccactactttaggtccaaaactcatgtttgaggtggtttcgcgcaatttcgttgtcgcacgtcacccattctgaaaacgggtatcaggtgcataaaagcacgagtttttgccaccggaaccatttcttcgtttttcataacgaacatgcccaatccactactttaggtccaaaactcatgtttgaggtggtttcgcacaatttcgttgtcgcacgtcacccattccgaaaacgggtgtcgggtgcatacaaagcacgagtttttgccaccggaaccatttcttcgtttttcgcaacgaacttgcccaatccactactttaggtccaaaactcatgtttggggtggtttcgcgcaatttcgttgtcgcacgtcacccattccgaaaacgggtgtgggggatacaaagcacgagtttttgccaccggaaccatttcttcgtttttcgcaacgaacatgcccagtccactacttcaggtccaaaactcatgtttggggtggtttcgcacaatttcgttgccgcacgtggtcatttcgaaaaaggttgtcggggtgcatacaaagcacgagtttttgccaccggaaccattttttcgttttttgcaacgaacatgcccaatccactactttaggtccaaaactcatgtttggggtggtttcgcacaatttcgttgccgcacgtcacccattccgaaaacgtgtgtcggggtgcatacaaagcacgagtttttgccactggaaccatttctttgtttttcgcaacgaacatgcccaatccactactttaggtccaaaactcatgtttcaggtggtttcgcgcaatttcgttgccgcccgtcacccattctgaaaacgggtgtgggggtgcatacaaagcacgagtttttgccaccggtaccatttcatcgtttttcacaacgaacatgcccaatccactactttaggtccaaaactcatgtttgaggtggtttcgcgcaatttcgttgtcgcacgtcacccattctaaaaacgggtatcg

SEQ ID NO: 753 - DNA, 1140 bp, Zea mays
  source (0)...(0): Zea mays BAC clone full insert sequence contig bacm.pk135.l06.fis9
taaaaacaacacgcatgtgatcaacatgttcatccatagatttgctgtagatcaatatgtcatcaaagtatactaccacaaattttccaatgaaggcacgcaaaacctcgttcattaatctcatgaaagtgctaggtgcattagttaacccataaggcatgactaaccactcatacaatccgaacttagttttgaaagcagttttccattcatctcccaatttcatacgaatctggtggtacccactacgcaaatcaactttagaaaagacgatggcaccactcaattcatcaagcatatcatctaaacgtggaatagggtgtcgataccgtatcgtgatattattaatagccctacaatcaacacacatacgccatgttccatcttttttaggcactaaaataaccggaacagcacacggactaagagactcacgcacgtaacctttgtcgagtagttcttgcacttgtcgctgaatttcttttgtttcctctggatttgtcctatatggcgcacgatttggcaaagatgcaccaggaataagatcaatttggtgctcaatccctcgtataggtggcagcccctctggtatctcacttggaaatacatcagaatactcctgcaaaatgttagtaataacaggaggcaaagaatgctgcatatcttgaattgaaatcaaagcatccttgcataccaaggcgtaggcaacagtagtggaagcaaataattcattaacatcagtttttgtcgcaagcaagcaatgtcctttcaattttatcccatctttgttattaccaacagctttaatattcttgttgttctcagttttagctttggtagctttagcaacatcatcacgcacaatagcctcaggggacatgggaagcaaaataattttcttatcatggtgtatgagagaatattgatttgatctaccatgatgcattcaatctgaatcaaattgccatggtctacctagcagaatattacaagcatccataggcacaacatcacagtcaacaacatcacgatatgaaccaatagcaaaattaattcgtaccagcttggttaccttgaccttaccactattgttaagccattgaatgtgatatagatgcgggtgcggtttggtcgtaagtg

SEQ ID NO: 754 - DNA, 2566 bp, Zea mays
  source (0)...(0): Zea mays BAC clone full insert sequence contig bacm.pk135.l06.fis10
aggggcaaaattttgttttccgtagacccggccttcggttttgggaaggggtaagttaaacaacgaactgagggcaacccaccccaacttgagctttagaccttcgatttggaaggggttttattaacgaaaaaagaagaaatttgttcggtgacaaaaaattgtgctttctctgcaccccgatttcggtttttggaatgggggacgtgcggcaaggaaattgcccccaacccccccaaacttgggttttaaacctaagttaggggatttggcatgttagaagggaaaaaagaaaaaagggttccggaggcaaaaatttgtgctttgtatgcacccgacacccgtttttggaatgggtgacgtgcgacaacgaaaatgcgagaaaccaccccaaacatgagttttggacctaaagtagtggattgggcatgttcgttgcgaaaaaagaagaaatggttccagtggcaaaaactcgtgctttgtatgcaccccgacacccgttttcggaatgggtgacgtgtgacaacaaaattgcgcgaaaccaccccaaacatgagttttgtacctaaagtagtggattgggcatgttcgttgcgaaaaacaaagaaatggttccggtggcaaaaactcgtgctttgtatgcaccccgacaaccgttttcggaatgggtgacgtgcggcaacgaaattgcgcgaaaccaccccaaacatgagttttggacctaaagtagtggattgggcatgttcgttgcgaaaaacgaagaaatggttccggtggcaaaaactcgtgctttgtatgcacccccacacccgttttcggaatgggtgacgtgcgacaacgaaattgcgcgaaaccaccccaaacatgagttttggacctaaagtagtggattgggcatgttcgttgcgaaaaacgaagaaatggttccggtggcaaaaactcgtgctctgtatgcacccgacacccgttttcggaatgggtgacgtgcaacaacgaaattgtgcgaaaccacccaaacatgagttttggacctaaagtagtggattgggcatgttccttgcgaaaaacaaaaaaatggtttcggtggtaaaaactcgtgctttgtatgcaccccgataaccgttttcggaatgggtgacgtgcggcaacgaaattgcgcgaaaccaccccaaacatgagttttggacctaaagtagtggattgggcatgttcgttgcgaaaaacgaagaaatggttccggtggcaaaaactcgtgctttgtatgcaccccgacaaccgttttcagaatgggtgacgtgcgacaacgaaattgcgcgaaaccaccccaaacatgagttttggacctaaagtagtggattgggcatgttcgttgtgaaaaacgaagaaatggttccggtggcaaaaacttgtgctttgtatgcaccccgataatcgttttcggaatgggtgacatgcggcaacgaaattgcgcgaaaccaccccaaacatgagttttggacctaaagtagtggattgggcatgttcgttgcgaaaaacgaagaaatggttccggtggcaaaaactcgtgctttgtatgcacccgacacccgttttcggaatgggtgacgtgcgacaacgaaattgtgcgaaaccaccccaaacatgagttttggacctaaagtagtggattgggcatgttcgttgcgaaaaacgaagaaatggttccagtggcaaaaactcgtgctttgtatgcaccccgacactggttttcggaatgagtgacgtgcggcaacgaaattgcgcgaaaccaccccaaacatgagttttggacctaaagtagtggattgggcatgttcgttgcgaaaaacgaagaaatggttccggtggcaaaaactcgtgctttgtatgcacccgacacccgttttcggaatgggtgacgtgcgacaacgaaattgcgcgaaaccaccccaaacatgagttttggacctaaagtagtggattgggcatgttcgttgcgaaaaacgaagaaatggttccagtggcaaaaactcgtgctctgtatgcacctgacacccgttttcggaatgggtgacgtgcaacaacgaaattgtgccaaaccacccaaacatgagttttggacctaaagtagtggattaagcatgttcgttgcgaaaaacgaagaaatggttccggtggcaaaaactcgtgctttgtatgcacccgacacccgttttcggaatgggtgacgtgcgacaacgaaattgtgcgaaaccacaccaaacatgagttttggacctaaagtagtggattgggcatgttcgttgcgaaaaacgaagaaatggtttcggtggcaaaaatgatgtagctgaggtgcccgatctttcggcgagtagagataattccgatttggcggaagatgacccttgcgatccgactacgacgagcaagcccgaggcgccaatgcaatcgctgaaccaactccctgtggttaccgaccttgctgatgcgagatcggcctgatcacgaagatcgtttcctgtgcgtaatcgaagaacgaacaagaaaaaagatgcgagcaatctaatct

SEQ ID NO: 755 - DNA, 2003 bp, Zea mays
  source (0)...(0): Zea mays BAC clone full insert sequence contig bacm.pk135.l06.fis11
taaaactgcacaacaagtcaaatcgacatcagccgcacctattaaatctgaaatcaagttgcactctcctgttttacttgctacacgtgctgattttgatgatctctatgaagctcatatgccctgttatgcacttgtatgctcgcgcatgcttgttccgcttgatgatgcaccgtctttggatataccccctgctgttgttaaccttttgcaggagtatgctgatgtttatcctacggacttaccaccgggtcttcctcccctccgtggcattgagcatcagatcgatctcatccccggcgcttctcttccgaaccgcgccccgtaccgtacaaatccagaggagacgaaggagatccagcgccaggtgcagacgctgcttgataagggttacattcgtgagtctcttagcccttgctcggttcctgttttactcgttccaaagaaagatgggtcatggcgaatgtgcgtagattgtcgtgctattaataacatcacagttcgttatcgatatcctattccacgccttgatgatatgttagatgagcttagtggtgccgttattttctctaaggttgatttgcgtagcggttaccatcagattagaatgaaactcggtgatgaatggaaaacggcttttaaaacaaaatttggtttatatgaatggttggttatgccatttggaatgactaatgctcccagcacctttatgcgtttaatgaacgaagttctacgggccttcataggtttgtttgttgttgtttatttcgatgatatccttatttacagcaagtctatagaggagcatttagaacatttgcgtgctgtttttgatgctttgtgtgctgctcgcttgtttggtaacatggaaaagtgcacattttgcacgcaacgtgtctcgtttcttggttatgtggttactccgcagggcattgaggtggatagcagcaagattgctgccattcgggagtggcctacaccaacgacggtcacataaattcggagctttcttggacttgccggtttctaccgcagatttgttcgtgattttagctccattgcagcgcctctacatgagcttacaaagaatgatgtcccgtttgcttggagtgattcacaggaggtagcgttcagcactttgaaagataagttaacccaagctcccctcttgcaattgcctgattttaataaagtttttgagcttgaatgcgatgctagcggtattgggctaggtgctgttttgttacaagaaggaaaaccagttgcttattttagtgaaaaattaagcggtgctagtctgaaatattctacttatgataaggagctttacgctttagtgcgcactttgcgtacatggcagcactatctttggcatcatgagttcataattcattctgatcatgaggctttaaaacatattcgtacccaaacaaatctgaaccgtcgtcatgctaaatgggtcgaattcattgagtcctttccttacattattaaacacaagaacgggaaggacaatgttattgctgatgctttgtctcgtcgctataccatgctgtcacaattagattttaaaatctttggtttggacactgtgaaggatcaatatgttgacgatgctgattttaaagatgctttcggccatgtattaatgggataccatggggcaaatttcacatacaggatgggttcctgtttcgtgctaacaagctgtgtgttccagctagttcggttcgtcttttgttgttacagcaggcgcatggaggcggtctcatggggcattttggcgtctacaaaacgcatgaggtgttggctgcccacttcttttggcctcggatgcgcgctgatgttgcgcgccttgttgcacgttgcactacttgtcagaaagctaagtcacggttgaacaaccatggtttgtatatgcctttgcctgtcccttcttctccttggcttgatatctctatggactttgttttgggcttgcctacaactaagaaggggaggga

SEQ ID NO: 756 - DNA, 2791 bp, Zea mays
  source (0)...(0): Zea mays BAC clone full insert sequence contig bacm.pk135.l06.fis12
ccaaaactcatgtttaggttggtttcgcgcaatttcgttgccgcacatcacccattccgaaaacggttgtcggggtgcatacaaagcacgagtttttgccaccggaaccatttcttcgtttttcgcaacgaacatgcccaatccactactttaggtccaaaactcatgtttagggtggtttctcgcaatttcgttgccgcacgtcacccattctgaaaacggttgtcgtgcatacaaagcacgagtttttgccaccggaaccattttttcgtttttcgcaacgaacatgcccaatccactactttaggtccaaaactcatgtttggggtggtttcgcgcaatttcgttgtcgcacgtcacccattccgaaaacgggtgtcgggtgcataaaagcacgagtttttgccaccggaaccatttcttcgtttttcgcaacgaacatgcccaatccactactttaggtccaaaactcatgtttggggtggtttcgcgcaatttcgttgccgcacgtcacccattccgaaaacggtggtcggggtgcatacaaagcacgagtttttgccatcggaaccatttctttgtttttcgcaacgaacatgcccaatccactactttaggtccaaaactcatgtttagtttctcgcaatttcgttgtcgcacgtcacacattctgaaaacgggtatcggggtgcataaaagcacgagtttttgccaccggaaccatttcttcgtttttcgtaacgaacatgcccaatccactactttaggtccaaaactcaagtttggggtggtttcgcacaatttcgttgtcgcacgttacccattccgaaaacgggtgtcgggtgcacacaaagcacgagtttttgccactggaaccatttcttcgtttttcgcaacgaacatgcccaatccactactttaggtacaaaactcatgtttggggtggtttcacgcaatttcgttgtcacatgtcacccattccgaaaacgatggtcggggtgcatacaaagcacgagtttttgccactggaaccatttcttcgtttttcgcaacgaacatgcccaatccactactttaggtccaaaactcatgtttagggtggtctctcgcaatttcgttgtcacacgtcacccattccgaaaacgggtgtcgggtgcatacaaagcacgactttttgccaccggaacaatttcttcgtttttcgcaacaaacatgcccaatccactactttaggtccaaaactcatgtttggggtggcttcgcgcaatttcgttgccgcacgtcacccattctgaaaacggttgtcggggtgcatacaaagcacgagtttttgccaccggaaccatttctttgtttttcgcaatgaacatgcccaatccactactttaggtccaaaactcatgtttggggtggtttcgcgcaatttcgttgccgcacgtcacccattctgaaaacggttgtcggggtgcatagaaagcacgagtttttgccattggaaccatttctaagtttttcgcaacgaacatgcccaatccactactttaggtacaaaactcatgtttggggtggtttcgcgcaatttcgttgtcgcacgtcactcattccgaaaacgagtgtcgggtgcataaaagcacgagtttttgccaccggaaccatttcttcatttttcgtaacgaacatgccaaatccactactttaggtccaaaactcatatttggggtggtttcgcacaatttcgttgttgcacgtcacccattccgaaaacgggtgtcgggtgcatacagagcacgagtttttgccaccggaaccatttcttcgtttttcgcaacgaacatgcccaatccactactttaggtccaaaactcatgtttggggtggtttcgcgcaatttcgttgccgcacgtcacccattccgaaaacggttgtcggggtgcatacaaagcacgagtttttgccaccggaaccatttcttcgtttttcgcaacgaacatgcccaatccactactttaggtccaaaacacatgtttggggtggtttcacgcaatttcgttgtcgcacgtcacccattccgaaaacgggtgtcgggtgcatacaaagcacgagtttttgccaccggaaccatttcttcgtttttcgcaacgaacatgtccaatccactactttacatccaaaactcatgtttggggtggtttcgcgcaatttcgttgtcgcacgtcacccattccaaaaacgggtgtcgggtgcataaaaagcacgagtttttgccaccggaaccatttctttgtttttcgcaacgaacatgcccaatccactactttaggtccaaaactcatgtttggggtggtttcgcacaattttgttgtcgcacgtcacccattccgaaaacgggtgtcggggtgcatgatgtagctgaggtgcccgatctttcggcgagtagagataattccgatttggcggaagatggcccttgcgatccgactacgacgagcaagcccgaggcgccaatgcaatcgctgaaccaactccctgtggttaccgaccttgctgatgcgagatcggcctgatcacgaagatcgtttcctgtgcgcaatcgaagaacgaacaagaaaaagatgcaagcaatctaatctattactcgagggtggaattctgaatacacgaagacagcgcagatttgcgcgtgttcgagagtagctaaggctaacgtaaaacaaaactcgaaaataaaggaggcgcagctcctggataaatagagggggcgcagcccctagggcggccaaccctaggtcgt

SEQ ID NO: 757 - DNA, 4382 bp, Zea mays
  source (0)...(0): Zea mays BAC clone full insert sequence contig bacm.pk135.l06.fis13
acatgcccaatctactactttaggtccaaaactcatgtttgaggtggttttgcacaatttcgttgtcgcacgtcacccattccgaaaacgggtgtcgggtgcatacaaagcacgagtttttgccaccggaaccatttcttcgtttttcgcaacgaacttgcccaatccactactttaggtccaaaactcatgtttggggtggtttcacgcaatttcgttgacgcacgtcacccattccgaaaacgggtgtgggggtgcatacaaagcacgagtttttgccaccggaaccatttcttcgttttccgcaacgaacatgcccagtccactactttaggtccaaaactcatgtttaggttggtttcgcgcaatttcgttgccgcacgtcacccattccgaaaacggttgtcggggtgcatacaaagcacgagtttttgccaccggaaccatttcttcgtttttcgcaacgaacatgcccaatccactactttaggtccaaaactcatgtttagggtggtttctcgcaatttcgttgccgcacgtcacccattctgaaaacggttgtcgtgcatacaaagcacaagtttttaccaccggaaccatttcttcgtttttcgcaacgaacatgcccaatccactactttaggtccaaaactcatgtttggggtggtttcgcgcaatttcgttgccgcacgtcacccattctaaaaacggttgtcgggggtgcatacaaagcacgagtttttgccaccagaaccatttatcgtttttcgcaacgaacatgcccaacccactactttaggtccaaaactcatgtttggggtggtttcgcgcaatttcgttgccgcacgtcacccattctgaaaacggttgtcgggggtgcatacaaagcacgatttttgccaccggaaccatttcttcgtttttcgcaatgaacatgcccaatccactactttaggtccaaaacccatgtttggggtggtttcgcgcaatttcgttgccgcacgtcactcattccgaaaacgagtgtcgggtgcataaaagcacgagtttttgccaccggaaccatttcttcttttttcgtaacgaacatgcccaatccactactttaggtccaaaactcatgtttggggtggtttcgcgcaatttcgttgccgcacgtcacccattccaaaaacgggtgtcgggtgcatacaaagcacgagtttttgccaccggaaccatttcttcgtttttcgcaacgaacatgcccaatccactactttaggtacaaaactcatgtttggggtggttttgcgcaatttcgttgtcacacgtcacccattctgaaaacgggtgtcggggtgcatacaaagcacgagtttttgccaccggaaccatttcttcgtttttcgcaacgaacatgcccaatccactactttaggtccaaaactcatgtttggggtgatttctcgcaatttcgttgtcacacgtcacccattccgaaaacaggtgtcggggtgcatacaaagcacgagtttttgccaccggaaccatttcttcgtttttcgcaacgaacatgcccaatccactactttaggtccaaaactcatgtttggggtgatttctcgcaatttcgttgtcgcacgtcacccattccgaaaacgggtgttgggtgcatacaaagcacgagttttttgccaccggaaccatttcttcgtttttcgcaacgaacatgcccaatccactactttaggtccaaaactcatgtttggggtggtttcgcgcaatttcgttgccgcacgtcacccattctaaaaacggttgtcgggggtgcatacaaagcacgagtttttgccaccggaaccatttatcgtttttcgcaacgaacatgcccaacccactactttaggtccaaaactcatgtttggggtggtttcgcgcaatttcgttgccgcacgtcacccattctgaaaacggttgtcggggtgcatacaaagcacgatttttgccaccggaaccatttcttcgtttttcgcaacgaacatgcccaatccactactttaggtccaaaacccatgtttggggtggtttcgcgcaatttcgttgccgcacgtcactcattccgaaaacgagtgtcgggtgcataaaagcacgagtttttgccaccggaaccatttcttcgtttttcgtaacgaacatgcccaatccactactttaggtccaaaactcatgtttggggtggtttcgcgcaatttcgttgccgcacgtcacccattctaaaaacggttgtcgggggtgcatacaaagcacgagtttttgccaccggaaccatttatagtttttcgcaacgaacatgcccaacccactactttaggtccaaaactcatgtttggggtggtttcgcgcaatttcgttgccgcacgtcacccattttgaaaacggttgtcggggtgcatacaaagcacgagttttttgccaccggaaccatttcttcgtttttcgcaacgaacatgcccaatccactactttaggtacaaaactcatgtttggggtggttttgcgcaatttcgttgtcacacgtcaccctttccgaaaacgggtgtcggggtgcatacaaagcacgagtttttgccaccggaaccatttcttcgtttttcgcaacgaacatgcccaatccactactttaggtccaaaactcatgtttagggtggtctctcgcaatttcgttgtcacacgtcacccattccgaaaacgggtgtcgggtgcatacaaagcacgactttttgccaccggaacaatttcttcgtttttcgcaacaaacatgcccaatccactactttaggtccaaaactcatgtttggggtggcttcgcgcaatttcgttgccgcacgtcacccattctgaaaacggttgtcggggtgcatacaaagcacgagtttttgccaccggaaccatttcttcgtttttcgcaacgaacatgcccaatccactactttaggtccaaaactcatgtttgaggtggtttcgcgcaatttcgttgtcgcacgtcacccattctgaaaacgggtatcaggtgcataaaagcacgagtttttgccaccggaaccatttcttcgtttttcataacgaacatgcccaatccactactttaggtccaaaactcatgtttgaggtggtttcgcacaatttcgttgtcgcacgtcacccattccgaaaacgggtgtcgggtgcatacaaagcacgagtttttgccaccggaaccatttcttcgtttttcgcaacgaacttgcccaatccactactttaggtccaaaactcatgtttggggtggtttcgcgcaatttcgttgtcgcacgtcacccattccgaaaacgggtgtcgcgtgcatacaaagcacgagtttttgccaccggaaccatttcttcgtttttcgcaacgaatatgcccaatccactactttggtccaaaactcatgtttggggtggtttcgcgcaatttcgttgccgcacgtcacccattccgaaaacggttgtcggggtgcatacaaagcacgagtttttgccaccggaaccatttcttcgtttttcgcaacgaacatgcccaatccactactttaggtccaaaactcatgtttggggtggtttcgcgcaatttcgttgccgcacgtcacccattccgaaaacggttgtcggggtgcatacaaagcacgagtttttgccaccggaaccatttcttcgtttttcgcaacgatcatgcccaatccactactttaggtccaaaactcatgtttagtttctcgcaatttcgttgtcgcacgtcacacattctgaaaacgggtatcggggtgcataaaagcacgagtttttgccaccggaaccatttcttcgtttttcgtagcgaacatgcccaatccactactttaggtccaaaactcatgtttggggtggtttcgcacaatttcattgtcgcacgttacccattccgaaaacgggtgtcgggtgcacacaaagcacgagtttttgccaccggaaccatttttttgtttttcgcaacgaacatgcccaatccactactttaggtacaaaaatcatgtttggggtggtttcacgcaatttcgttgtcacatgtcacccattccgaaaacgggtgtcggggtgcatacaaagcacgagtttttgccactggaaccatttcttcgtttttcgcaacgaacatacccaatccactactttaggtccaaaactcatgtttggggtggtttctcgcaatttcgttgtcacacgtcacccattccgaaaatgggtgtcgggtgcatacaaagcacgagtttttgccactggaaccatttcttcgtttttcgcaacaaacatgcccaattcactactttaggtccaaaactcatg

SEQ ID NO: 758 - DNA, 3540 bp, Zea mays
  source (0)...(0): Zea mays BAC clone full insert sequence contig bacm.pk135.l06.fis14
taccgtacgcatgatgtctggcgtgctgcgtgacgcggcccgtgcccctcgtcgaagggatcgagcattgtggtctaaattatattgggttaccccatggtttttttgtcccccttgtttgaagtgcagtttatctatctttatacatatatttaaactttactctacgaataatataatctatagtactacaataatatcagtgttttagagaatcatataaatgaacagttagacatggtctaaaggacaattgagtattttgacaacaggactctacagttttatctttttagtgtgcatgtgttctcctttttttttgcaaatagcttcacctatataatacttcatccattttattagtacatccatttagggtttagggttaatggtttttatagactaatttttttagtacatctattttattctattttagcctctaaattaagaaaactaaaactctattttagtttttttatttaataatttagatataaaatagaataaaataaagtgactaaaaattaaacaaataccctttaagaaattaaaaaaactaaggaaacatttttcttgtttcgagtagataatgccagcctgttaaacgccgtcgacgagtctaacggacaccaaccagcgaaccagcagcgtcgcgtcgggccaagcgaagcagacggcacggcatctctgtcgctgcctctggacccctctcgagagttccgctccaccgttggacttgctccgctgtcggcatccagaaattgcgtggcggagcggcagacgtgagccggcacggcaggcggcctcctcctcctctcacggcaccggcagctacgggggattcctttcccaccgctccttcgctttcccttcctcgcccgccgtaataaatagacaccccctccacaccctctttccccaacctcgtgttgttcggagcgcacacacacacaaccagatctcccccaaatccacccgtcggcacctccgcttcaaggtacgccgctcgtcctccccccccccccctctctaccttctctagatcggcgttccggtccatggttagggcccggtagttctacttctgttcatgtttgtgttagatccgtgtttgtgttagatccgtgctgctagcgttcgtacacggatgcgacctgtacgtcagacacgttctgattgctaacttgccagtgtttctctttggggaatcctgggatggctctagccgttccgcagacgggatcgatttcatgattttttttgtttcgttgcatagggtttggtttgcccttttcctttatttcaatatatgccgtgcacttgtttgtcgggtcatcttttcatgcttttttttgtcttggttgtgatgatgtggtctggttgggcggtcgttctagatcggagtagaattctgtttcaaactacctggtggatttattaattttggatctgtatgtgtgtgccatacatattcatagttacgaattgaagatgatggatggaaatatcgatctaggataggtatacatgttgatgcgggttttactgatgcatatacagagatgctttttgttcgcttggttgtgatgatgtggtgtggttgggcggtcgttcattcgttctagatcggagtagaatactgtttcaaactacctggtgtatttattaattttggaactgtatgtgtgtgtcatacatcttcatagttacgagtttaagatggatggaaatatcgatctaggataggtatacatgttgatgtgggttttactgatgcatatacatgatggcatatgcagcatctattcatatgctctaaccttgagtacctatctattataataaacaagtatgttttataattattttgatcttgatatacttggatgatggcatatgcagcagctatatgtggatttttttagccctgccttcatacgctatttatttgcttggtactgtttcttttgtcgatgctcaccctgttgtttggtgttacttctgcaggtcgaccgccggggatccacacgacaccatgtcccccgagcgccgccccgtcgagatccgcccggccaccgccgccgacatggccgccgtgtgcgacatcgtgaaccactacatcgagacctccaccgtgaacttccgcaccgagccgcagaccccgcaggagtggatcgacgacctggagcgcctccaggaccgctacccgtggctcgtggccgaggtggagggcgtggtggccggcatcgcctacgccggcccgtggaaggcccgcaacgcctacgactggaccgtggagtccaccgtgtacgtgtcccaccgccaccagcgcctcggcctcggctccaccctctacacccacctcctcaagagcatggaggcccagggcttcaagtccgtggtggccgtgatcggcctcccgaacgacccgtccgtgcgcctccacgaggccctcggctacaccgcccgcggcaccctccgcgccgccggctacaagcacggcggctggcacgacgtcggcttctggcagcgcgacttcgagctgccggccccgccgcgcccggtgcgcccggtgacgcagatggatccaccggtcgccaccatggcctcctccgagaacgtcatcaccgagttcatgcgcttcaaggtgcgcatggagggcaccgtgaacggccacgagttcgagatcgagggcgagggcgagggccgcccctacgagggccacaacaccgtgaagctgaaggtgaccaagggcggccccctgcccttcgcctgggacatcctgtccccccagttccagtacggctccaaggtgtacgtgaagcaccccgccgacatccccgactacaagaagctgtccttccccgagggcttcaagtgggagcgcgtgatgaacttcgaggacggcggcgtggcgaccgtgacccaggactcctccctgcaggacggctgcttcatctacaaggtgaagttcatcggcgtgaacttcccctccgacggccccgtgatgcagaagaagaccatgggctgggaggcctccaccgagcgcctgtacccccgcgacggcgtgctgaagggcgagacccacaaggccctgaagctgaaggacggcggccactacctggtggagttcaagtccatctacatggccaagaagcccgtgcagctgcccggctactactacgtggacgccaagctggacatcacctcccacaacgaggactacaccatcgtggagcagtacgagcgcaccgagggccgccaccacctgttcctgtagcggccggccgcaacctagacttgtccatcttctggattggccaacttaattaatgtatgaaataaaaggatgcacacatagtgacatgctaatcactataatgtgggcatcaaagttgtgtgttatgtgtaattactagtctgcagcatttggctaccttaagagagtcatagttatagctcgagcggccagcttgatatcgaattcgcccttagggtttagggtttagggtttagggtttagggtttagggttctg

SEQ ID NO: 759 - DNA, 7739 bp, Zea mays
  source (0)...(0): Zea mays BAC clone full insert sequence contig bacm.pk135.l06.fis15
aatctaaattgttgcctcgagccgatggaccgtttaaagtgctagagaaaattaacgacaatgcatataggctagatctgcctgcagactttggggttagccccacatttaacattgcagatttaaagccctacttgggagaggaagttgagcttgagtcgaggacgactcaaatgcaagaaggggagaatgatgaagacatccacactgctgatacatctatgccaatacaagtaccaatttctggtcccattactcgcgcttgtgctcgtcaactcaaccatcaggtgattacactcttgagttcatgtccatcttatttagaccatggagacccgtgcactcttgttttgcttaggaaccagggagaagaccgaaagggaaaaggatttgaacatgctggattcggactgcagaagaacaccaacttgtgacggtcaccacggtcagatgcgggctcggattggaatgttcaagcacaacatggaacgcttatcaagtctactttcatatggatccggaattatagtcatatctgttctgaggccgccgtaatcattgttttcttaccgagatattttctgccttttctgcccatggtgctgcgtcaccctattttggcccaatgggtcgtgtatcaagttaggtccattagggacgcaacctagggttgcagcacgaccccaatacccttgtggtcgtcctcccatgtttatagaccctctagccgccaccaagaacagcgggttttgtttagatcaagtttagctctcgctacttgcttgcaagtgcgcgtgctagttcagccgcccgtcttcttgtcttcggaaccccaccatattggagtttgactttgaaacctacatttagatctggtaattcagtacttgttctacttgttcttgctagttcttcgattgtttgcaggacgagtgccctagtggccagggtgtcacgctccacaagatcgtgacagccataggaggtggtgtatcggttgctaaggcgcagcgtctttggaaggctgtagtcgggtcgtgaacgtcgtctcctcccccaattgagttattccacaccctctcatcgaaagaccgggcaatcacccaacgggtgcacatcaaaaccacctcaaacatgagttttggacctaaagtagtggattgggcatgttcgttgtgaaaaacgaagaaatggttccggtggtaaaaactcgtgctctgtatgcacccgacacccgttttcggaatgggtgacgtgcgacaacgaaattgcgagaaatcaacccaaacaagagttttggacctaaagtagtggattgggcaagttcgttgcgaaaaacgaagaaatggttccggtggcaaaaactcgtgcttttatgcacccgacacccgttttcggaatgggtgacgtgcgacaacgaaattgcgcgaaaccaccccaaacatgagttttggacctaaagtagtggattgggcatgttcgttgcgaaaaacgaagaaatggttccggtggcaaaaactcgtgctctgtatgcacccgacacccgttttcggaatgggtgacgtgcaacaacgaaattgtgcgaaaccaccccaaacatgagttttggacctaaagtagtggattgggcatgttcgttgcgaaaaacgaagaaatggttccggtggcaaaaactcgtgctttgtatgcacccgacacccgttttcggaatgggtgacgtgcgacaacgaaattgcgagaaatcaccccaaacaagagttttggacctaaagtagtggattaggcatgttcgttgcgaaaaacgaagaaatggttccggtggcaaaaactcgtgctttgtatgcaccccgacacccgttttcgaaatgggtgacgtgtgacaacgaaattgcgcaaaaccaccccaaacatgagttttgtacctaaagtagtggattgggcatgttcgttgcgaaaaacgaagaaatggttccggtggcaaaaactcgtgctttgtatgcaccccgacaaccgttttcggaatgggtgacgtgcggcaacgaaattgcgcgaaaccaccccaaacatgagttttggacctaaagtagtggattgggcatgttcgttgcgaaaaacgaagaaaatggttccggtggcaaaaactcgtgctttgtatgcacccgacacccgttttcggaatgggtgacgcgcgacaacgaaattgcgcgaaaccaccccaaacatgagttttggacctaaagtagtggattgggcatgttcgttgcgaaaaaagaagaaatggttccggtggcaaaaactcgtgcttttatgcacccgacactggttttcggaatgagtgacgtgcgacaacgaaattgcgcgaaaccaccccaaacatgagttttggacctaaagtagtggattgggcatgttcgttgtgaaaaacgaagaaatggttccggtggcaaaaactcgtgctttgtatgcacccccacacccgttttcggaatgggtgacgtgcgacaacgaaattgcgcgaaaccaccccaaacatgagttttggacctaaagtagtggattgggcatgttcgttgcgaaaaacgaagaaatggttccggtggcaaaaactcgtgctctatatgcacccgacacccgttttcggaatgggtgacgtgcaacaatgaaattgtgcgaaaccacccaaacatgagttttggacctaaagtagtggattgggcatgttcgttgcgaaaaacgaagaaatggtttcggtggcaaaaactcgtgctttgtatgcaccccgataaccgttttcggaatgggtgacgtgcggcaacgaaattgcgcgaaaccaccccaaacatgagttttggacctaaagtagtggattgggcatgttcgttgcgaaaaacgaagaaatggttccggtggcaaaaactcgtgctttgtatgcacccccacacccgttttcagaatgggtgacgggcggcaacgaaattgcgcgaaaccacccacaacatgagttttggacctaaagtagtggattgggcatgttcgttgcgaaaaacaaaaaaatggttccagtggcaaaaactcgtgctttgtatgccccccgacacacgttttcggaatgggtgacgtgcggcaacgaaattgtgcgaaaccaccccaaacatgagttttggacctaaagtagtggattgggcatgttcgttgcgaaaaaagaagaaatggttccggtggcaaaaactcgtgctttgtatgcaccccgacaacctttttggaaatgaccacgtgcggcaacgaaattgtgcgaaaccaccccaaacatgagttttggacctgaagtagtggattgggcatgttcgttgcgaaaaacgaagaaatggttccggtggcaaaaactcgtgctttgtatgcacccgacacccgttttcggaatgggtgacgtgcgacaacgaaattgcgcgaaaccaccccaaacatgagttttggatgtaaagtagtggattgggcatgttcgttgcgaaaaacgaagaaatgattccggtggcaaaaactcgtgctttgtatgcacccgacacccgttttcggaatgggtgaagtgcgacaacgaaattgtgcgaaaccaccccaaacatgagttttggacctaaagtagtggattgggcatattcgttacaaaaaacgaagaaatggttccggtggcaaaaactcgtgcttttatgcaccccgatacccgttttcagaatgggtgacgtgcgacaacgaaattgcgcgaaaccacctcaaacatgagttttggacctaaagtagtggattgggcatgttcgttgtgaaaaacgaagaaatggttccggtggcaaaaactcgtgctttgtatgcacccccgacaaccgtttttagaatgggtgacgtgcggcaacgaaattgcgcgaaaccaccccaaacatcagttttggacctaaagtagtggattgggcatgttcgttgcgaaaaacgaagaaatggttccggtggcaaaaaactcgtgctttgtatgcacccaacacccgttttcggaatgggtgacgtgcgacaacgaaattgcgagaaatcaccccaaacatgagttttggacctaaagtagtggattgggcatgttcgttgcgaaaaacgaagaaatggttccggtggcaaaaactcgtgctttgtatgcaccccgacacctgttttcggaatgggtgacgtgtgacaacgaaattgcgagaaatcaccccaaacatgagttttggacctaaagtagtggattgggcatgttcgttgcgaaaaacgaagaaatggttccggtggcaaaaactcgtgctttgtatgcaccccgacacctgttttcggaatgggtgacgtgtgacaacgaaattgcgcaaaaccaccccaaacatgagttttgtacctaaagtagtggattgggcatgttcgttgcgaaaaacgaagaaatggttccggtggcaaaaaactcgtgctttgtaccgaaaaccgttttcagaatgggtgacgtgcggcaacgaaattgcgcgaaaccaccccaaacatgagttttggacctaaagtagtgggttgggcatgttcgttgcgaaaaactataaatggttccggtggcaaaaactcgtgctttgtatgcacccccgacaaccgtttttagaatgggtgacgtgcggcaacgaaattgcgcgaaaccaccccaaacatgagttttggacctaaagtagtggattgggcatgttcgttacgaaaaacgaagaaatggttccggtggcaaaaactcgtgcttttatgcacccgacactcgttttcggaatgagtgacgtgcggcaacgaaattgcgcgaaaccaccccaaacatgggttttggacctaaagtagtggattgggcatgttcgttgcgaaaaacgaagaaatggttccggtggcaaaaactcgtgctttatatgcacccccgacaaccgttttcagaatgggtgacgtgcgggaacgaaattgcgcgaaaccaccccaaacatgagttttggacctaaagtagtggtggattgggcatgttcgttgcgaaaaacgaagaaatagttctggtggcaaaaactcgtgcttttatgcacccgacacccgttttcggaatgggtgacgtgcggcaacgaaattgcgcgaaaccaccccaaacatgagtgttgtacctaaagtagtggattgggcatgttcgttgcgaaaaacgaaaaaatggttccggtggcaaaaactcgtgctttgtatgcaccccgacaaccgttttcagaatgggtgacgtgcggcaacgaaattgcgcgaaaccaccccaaacatgagttttggacctaaagtagtagattgagcatgttcgttgcgaaaaacgaaaaaatggttccggtggcaaaaactcgtgctttgtatgcaccccacacccgttttcggaatgggtgacgtgtgacaacgaaattgcgcgaaacaaccccaaacatgagttttgtacctgaagtagtggattgggcatgttcgttgcgaaaaaacgaaaaaaatggttccggtggcaaaaaactcgtgctttttatgcaccccccacacccgttttcggaatgggtgacgtgcgacaacgaaattgcgcgaaaccaccccaaacatgagttttggacctaaagtagtggattgggcaagttcgttgcgaaaaacgaagaaatggttccgttggcaaaaactcgtgctttgtatgcacccgacacccgtttttggaatgggtgacgtgcgacaacgaaattgtgcgaaaccacctcaaacatgagttttggacctaaagtagtggattgggcatgttcgttacgaaaaacgaagaaatggttccggtggcaaaaactcgtgcttttatgcacccgatacccgttttcagaatgggggatgacgtgcgacaacgaaattgcgcaaaaccacctcaaacatgagttttggacctaaagtagtggattgggcatgttcgttgcgaaaaacgaagaaatggttccggtggcaaaaactcgtgctttgtatgcaccccgacaaccgttttcgaaatgaccacgtgcggcaacgaaattgcgcgaaaccaccccaaacatgagttttggacctaaagtagtggattgggcatgttcgttgcgaaaaacgaagaaatggttccggtggcaaaaactcgtgctttgtatgcacccgacacccgtttttggaatgggtgacgtgtgacaacgaaattgcgagaaaccaccccaaacatgagttttggacctaaagtagtggattgggcatgttcgttgcgaaaaaagaagaaatggttccagtggcaaaaaatcgtgctttgtatgcaccccgacacccgtttttggaatgggtgacgtgtgacaacaaaattgcgcgaaaccaccccaaacatgagttttgtacctaaagtagtggattgggcatgttcgttgcgaaaaacaaagaaatggttccggtggcaaaaactcgtgctttgtatgcaccccgacaaccgttttcggaatgggtgacgtgcggcaacgaaattgcgcgaaaccaccccaaacatgagttttggacctaaagtagtggattgggcatgttcgttgcgaaaaacgaagaaatggttccggtggcaaaaactcgtgctttgtatgcacccccacacccgttttcggaatgggtgacgtgcgacaacgaaattgcgcgaaaccaccccaaacatgagttttggacctaaagtagtggattgggcatgttcgttgtgaaaaacgaagaaatggttccggtggcaaaaacttgtgctttgtatgcaccccgataatcgttttcggaatgggtgacatgcagcaacgaaattgcgcgaaaccaccccaaacatgatttttggacctaaagtagtggattgggcatgttcgttgcaaaaaacaaaaaaatggttccggtggcaaaaactcgtgctttgtatgcacccgacacccgttttcggaatgggtgacgtgcgacaacaaaattgcgagaaatcaccccaaacatgagttttggacctaaagtagtggattgggcatgttcgttgcgaaaaacgaagaaatggttccggtggcaaaaactcgtgctttgtatgcaccccgacaaccgttttcggaatgggtgacgtgtgacaacgaaattgcgcgaaaccaccccaaacatgatttttggacctaaagtagtggattgggcatgttcgttgcaaaaaacgaaaaaatggttccggtggcaaaaactcgtgctttgtatgccccccaaccccctttttcggaatgagtgacgtgcggcaacaaatttgcgcgaaaccaccccaaacatgatttttggacctaaagtagtggattcggcttgttctttgcaaaaaacaaaaaaatggttccgggggcaaaaactcgtgctttgtatgccccccaccccctttttcgaaaggggtgacgtgcgacaacaaaattgcgcaaaaccaccccaaacatgatttttggacctaaagtagtggattgggcatgttcgttgcaaaaaacaaaaaaatggttccgggggcaaaaactcgagctttgactgacccccacaccggttttcaaaatgggtgacgtgcgacaacaaaattgggcgaaccccccccaaaaggatttgtctacctaaagtaggggattggccatgcttgttaccaaaacaaaaaaaatggttccggggtgcaa

SEQ ID NO: 760 - DNA, 8713 bp, Zea mays
  source (0)...(0): Zea mays BAC clone full insert sequence contig bacm.pk135.l06.fis16
aacaaagatgttttagctcccattatcgtgtggttgggcttatttttcctggcataaaaaaaaaaattttttttcgtggaaaaaaatctccttcttttttacccccccccaaacgtttttttcataggtggtgacggggcacgaattagcggggtgacaccccccccaacctgttttttccacatcatgtggggtgggggtgtttctttggataaaaatagaaaaaatttttttgccaaaaaaaagttttcattatccccaccccgaccttttttgtgagagggggcgtgtggcggcaaaaaaattgtaaaaatccccccaaagagttttggccctaaaatttgggttgggggctttttttgaaaaaaaaaaaaaagtttttgtggcaaaaaaaaactcgtgcgttttccgcacccgggacaatttttttcagggtgggtgacgggaggcaaagaaattgggagaacccaccccaaacttttgttttggacaaaaggtggtggatcgggcattttggttgaaaaaaacgaagaatttgttgggggggaaaaaattcgtgtttttatgcacccgacacccgttttcggaatgggtgacgtgcggcaacgaaattgcgcgaaaccaccccaaacatgagtgttgtacctaaagtagtggattgggcatgttcgttgcgaaaaacgaagaaatggttccggtggcaaaaactcgtgctctgtatgcacccgacacccgttttcggaatgggtgacgtgcgacaacgaaattgtgcgaaaccaccccaaacatgagttttggacctaaagtagtggattgggcatgttcgttacgaaaaacgaagaaatggttccggtggcaaaaactcgtgcttttatgcacccgacactggttttcggaatgagtgacgtgcggcaacgaaattgcgcgaaaccaccccaaacatgagttttggacctaaagtagtggattgggcatgttcgttgcgaaaaacgaagaaatggttccggtggcaaaaactcgtgctttgtatgcacccgacacccgttttcggaatgggtgacgtgcgacaacgaaattgcgcgaaaccaccccaaacatgagttttggacctaaagtagtggattgggcatgttcgttgcgaaaaacgaagaaatggttccagtggcaaaaactcgtgctctgtatgcacctgacacccgttttcggaatgggtgacgtgcaacaacgaaattgtgccaaaccacccaaacatgagttttggacctaaagtagtggattgggcatgtttgttgcgaaaaacgaagaaatggtttcggtggcaaaaactcgtgctttgtatgcaccccgataaccgtttttcggaaggggggaggtgtgacaacaaaattgggcaaaacccccccaaactgggttttggtacataagttagaggatggggcatttttgttgcgaaaaaaaaaaaaatggttcggggggcaaaaaatcgtgttttttatgcccccgacacccgtttttggaatgggtgacgtgcggcaacgaaattgcgggaaaccaccccaaacatgagttttggacctaaagtagtggattgggcatgtttgttacgaaaaaagaagaaatggttccggtggcaaaaaatcgtgtttttatgcacccgacactcgttttcggaatgagtgacgtgcggcaacgaaattgcgcgaaaccaccccaaacatgggttttggacctaaagtagtggattgggcatgttcattgcgaaaaacgaagaaatggttccggtggcaaaaatcgtgctttgtatgcacccccgacaaccgttttcagaatgggtgacgtgcggcaacgaaattgcgcgaaaccaccccaaacatgagttttggacctaaagtagtgggttggggcatgttcgttgtgaaaaaaagaaaaaatggttttggtggcaaaaaatagtgttttgtttgcacccccgacaactgtttttgaatgggtgacgtgcggcaacgaaattgcgcgaaaccaccccaaacatgagttttggaccaaaagtatgggattgggcatgtttcgttgcgaaaaaaagaaagaaatggttccggtggcaaaaaactcgtgctttgtatgcacccaacacccgttttcggaatgggtgacgtgcgacaacgaaattgcgagaaatcaccccaaacatgagttttggacctaaagtagtggattgggcatgttcgttgcgaaaaacgaagaaatggttccggtggcaaaaactcgtgctttgtatgcaccccgacacctgttttcggaatgggtgacgtgtgacaacgaaattgcgagaaatcaccccaaacatgagttttggacctaaagtagtggattgggcatgttcgttgcgaaaaacgaagaaatggttccggtggcaaaaactcgtgctttgtatgcaccccgacacccgttttcagaatgggtgacgtgtgacaacgaaattgcgcaaaaccaccccaaacatgagttttgtacctaaagtagtggattgggcatgttcgttgcgaaaaacgaagaaatggttccggtggcaaaaactcgtgctttgtatgcacccgacacctgttttcgaaatgggtgacgtgcgacaacgaaattgtgtgaaaccaccccaaacatgagttttggacctaaagtagtggattgggcatgttcgttacgaaaaatgaagaaatggttccggtggcaaaaactcgtgcttttatgcacctgacactcgttttcggaatgagtgacgtgcggcaacgaaattgcgcgaaacaacccaaaacatgagttttggacctaaagtagtggattgggcatgttcgttacgaaaaacgaagaaatggttccggcggcaaaaactcgtgcttttatgcacctgacactcgttttcagaatgagtgacgtgcggcaaccaaattgcgcgaaaccacccaaaacatgagttttggacctaaagtagtggattgggcatgttcgttgcgaaaaacgaagaaatggttccggtggcaaaaactcgtgctttgtatgcacccgacacccgtttttggaatgggtgacgtgcggcaacgaaattgcgcgaaaccaccccaaacatgagttttggacctaaagtagtggattgggcatgttcgttacgaaaaacgaagaaatggttccggtggcaaaaactcgtgcttttatgcacccgacactcgttttcggaatgagtgacgtgcggcaacgaaattgtgtgaaaccaccccaaacatgggttttggacctaaagtagtggattgggcatgttcgttgcgaaaaacgaagaaatggttccggtggcaaaaatcgtgctttgtatgcaccccgacaaccgttttcagaatgggtgacgtgctgcaacgaaattgcgcgaaaccaccccaaacatgagttttggacctaaagtagtgggttgggcatgttcgttgcgaaaaacgataaatggttccggtggcaaaaactcgtgctttgtatgcacccccgacaaccgtttttagaatgggtgacgtgcggcaacgaaattgcgcgaaaccaccccaaacatgagttttggacctaaagtagtggattgggcatgttcgttgcgaaaaacgaagaaatggttccggtggcaaaaaactcgtgctttgtatgcacccaacacccgttttcggaatgggtgacgtgcgacaacgaaattgcgagaaatcaccccaaacatgagttttggacctaaagtagtggattgggcatgttcgttgcgaaaaacgaagaaatggttccggtggcaaaaactcgtgctttgtatgcaccccgacacctgttttcggaatgggtgacgtgtgacaacgaaattgcgagaaatcgccccaaacatgagttttggacctaaagtagtggattgggcatgttcgttgcgaaaaacgaagaaatggttccggtggcaaaaactcgtgctttgtatgcaccccgacaccaatcgttttcggaatgggtgacgtgcggcaacgaaattgcgcgaaaccaccccaaacatgagttttggacctaaagtagtggattgggcatgttcgttgcgaaaaacgaagaaatggttccggtggcaaaaactcgtgctttgtatgcacccgacacccgttttcggaatgggtgacgtgcgacaacgaaattgcgcgaaaccaccccaaacatgagttttggacctaaagtagtggattgggcatgttcgttgcgaaaaacgaagaaatggttccggtggcaaaaactcgtgctttgtatgcacccgacacccgttttcggaatgggtgatgtgcgacaacgaaattgcgcgaaaccaccccaaacatgagttttggacctaaagtagtggattggacatgttcgttgcgaaaaacgaagaaatggttccggtgccaaaaactcgtgctccgtatgcacccgacacccgttttcggaatgggtgacgtgcgacaacgaaattgtgcgaaaccaccccaaacatgagttttggacctaaagtagtggattgggcatgttcgttacgaaaaacaaagaaatggttccggtggcaaaaactcgtgctttgtatgcacccgatacccgttttcggaatgggtgacgtgcgacaacgaaattgcgcgaaaccgcccgaaacatgagttttggatctaaagtagtggattgggcatgttcgttgcgaaaaacgaagaaatggttccggtggcaaaaactcgtgctttgtatgcacccaacacccgttttcagaatgggtgacgtgcgacaacgaaattgcgcgaaatcacctcaaacatgagttttggacctaaagtagtggattgggcatgttcgttgcgaaaaacgaagaaatggttccggtggcaaaaactcgtgcttttatgcacccgacactcgttttcggaatgagtgacgtgcggcaacgaaattgcgcgaaaccacccaaaacatgagttttgtacctaaagtagtggattgggcatgttcgttgagaaaaacgaagaaatggttccggtggcaaaaacgcgtgctttgtatgcacccccacacccgttttcagaatgggtgacgtgcggcaacgaaattgcgcgaaaccgcccgaaacatgagttttggacctaaagtagtggattgggcatgttagttgcgaaaaacaaagaaatggttccggtggcaaaaactcgtgctttgtatgcaccatgacacccgttttcggaatgggtgacgtgcgacaacgaaattgtgcgaaaccaccccaaacatgagttttggacctaaagtagtggattgggcatgttcgttgcgaaaaacgaaggaatggttcctgatgaggacatcactatcattgatacaaccataccagtgaccacttcaccattcgtagctaatcaaggaccaatgacacgagcccgtgcacgtaaacttaattatcaggtgaactcgttctttgctattgaagctaattcttctttaaatgaggtactaaagccttgcaatgactttattatgctcaggtgtttgggaggtgaaccatcttggattggagaaggcaacaaggcaataaaggctgctgcacccgagaggatttcgtaacagcacaagtacaagtttaaatggggcatatcttccaacttccaaggccgtttaatgcaaataaatacttgttggaaagctcccttcgtctacttgctggtggatcaagaattaatgggagactacacccgaggcgtccagaaactgccgagggaacttcatgactccaccagaattccttcttcctatttctctatttaagcaactagcagccaccaaagaacttgggttttgtttgatgtaagtttagcctttgctacttccttgtaaacgcgtgtgtcggctagaccacccgaatacttgaaacgggaccccaactttatcagatccgtgcgtgtttgcttgttatcttgttcttgcttgttctcgattgcttgcaggttcaaggctgttcttggcacggcaagagcagcaacaacaggagccggtgtaactatcgctaaggcgcaacacccttgtggttgttgtagtcggatagcacaacgtcgacctccaccccaaatcgtagttatcaggagacggtgtacctgtcgctcaaggcgccacaccatcttggttgtggtagtcgggcagccaacgtcgttctccaacaagttttccacctccatcatctctcatcgaaagatcgggcacccttctacccgttgggttcatcaagtggtatcaaatttcaggttgctcggtgagagatctccatcttccttattttatttacctacagtccacttttgccaaagatatatttagagcagaaaatcacctaaaaacattttgagcctttgctttactacttagttttcgacttgttgaattcacggttgctgcatttgtgtcgagttgctggtccaaagtttcttgctgctagagtttcgagttcgtgccaccttgtttagatcaccatttttagttctctagctgttctctagctgtagttcaaaaaaacaaggaaaaggaaaaggcaagtgcacaaaaaaagtcacgctgataaaaaaaagcacgtacaaaaaagagaaaaaaaatcgcagtaagaatattggtagataaaattccatgtgcaacaaaacaaagacagtttgtgtgccaccgtttgacaattttctaagtcagcttgctgttttgagtatttggtgatatcatttgtgtaacggctcgcgtctctattacggtttggactaggaccagcacaacaccattgtggaacgattattcaacttgttgtggctaatgtggtactagctattccttggaactattgttttagcagccacctataaatccacaaatttttctacaacaccaccaggttgtgctagcagccactgttgttgttcttgctgtttgccagcgccacttgctttgcgtggtgagaacttgtaagagcttgatttcttgctagtgaggtagtgtttatccatccacatcatagcaactactaggctgcattacttgtttttgtatctcttttgcactaaccatggcagaggatgcaaatgcgcgacctccacattctccacgaacagtgggcatcattcaacatttcgaacgtcaagtatggttgcacacagatgccctcaatgaagatgttcaagtcaccaatgagcgcattggtcaattagaaacagcacaaattgttaccgacaacacattgaccactttggaacgaacagttgctgctgctaacacctctcttgcagcaattattgagcgcttagataggatggaccaagttgggcgtgaaggtaggcaacaaggtgatgatgatggctatggttccattgctggtaccgcaagagatgatgctacggagtattcagcagacaccgagcgtgatgaccgatctattaggcaccgacgacaccaacgacgtgatcgccatggcttgggtggtcgacctccacgacgtgaggtacgtgaaaatgatgattctctaggaagaattaaattctccataccatcgtttgatggaaaatatgatcctgatgcatatctaacatgggaattgtcggtagatcaaaaatttgcatgctatgatttttctgatgataaaaaggttagagctgctacgagtgaattcactgattttgcttctatttggtggcatgagtaccaaactacacatccagctaccataccacaaacttggaatgctttaaaaagaatcatgcgtagtcgttttgttccttcctatcatgctcgtgatttattacataaattacaacagcttagacaaggcaacaaatctgttgaagagtattatcaacaattacaaataggcatgttgaggtgtggtctcgtagaaaatgaagaagctgcaatggctaggttcatgggtggtttgacaagagaaattcaggatatattagcttacaaggaatacactaatgttactcgcttatttcatcttgcttgtaaggctgaaagagaagtccagggacgatgcttgagaactaacacttatgcaggtcgcaatacatcttggcagccccgcactagtgctgctagctctaaccatgtgtttcagggagatgcttccaatagatcatccacaacaccatcgaaatcagcaccttctcgtgctattgagacagggaaaggatcctcccaagctgtagccaaatcttcttctattgcttccacgggaagaacaaaggacatccaatgcctccaatgcaaaggatttgggcacattcgaagggactgcccaagcaagcgtgtactaattataagagaaaatggtgagtactcatcagccagcgatttagataatgatacatatgccatgcttgctgcccaagatgctgaaaaggagcatgatgatgaagagcatattggggctgaacatgctgaacactatgagagcctcgttgtaagacgtgtcttgagtgcccaaattattaaagctgaacaaaaccagcgacacaatttgttccaaactaaatgtgtagttttggaacgatcttgtcgtattataattgatggaggaagctgcaacaacttagcaagcaccaccatggtagagaagcttgggctgaaaacgcttccacatccacacccctactacatccaatggttcaacgacagtggt

SEQ ID NO: 761 - DNA, 10900 bp, Zea mays
  source (0)...(0): Zea mays BAC clone full insert sequence bacm.pk135.l06.fis17
gacagcccccttttcaaaatttttgagtggggcaacaagattcagcgaaaacgcccgaaaccacccttttgaccaatttgggcggaaagggcaggtttggggcgaaaaaggaagaaatggttccggggggttaaagtggcaaaattttgtgcttttatacacttctttaccagtttttacgaggggcgacgtgagtcaacgaaatcgcgtcaaaccacctcttacgacagtttttggccgaaagtggttgtttgggccgaaaaacggagaaaaagttcgaaagggttaaagtggcaaaaaatcgtgccccctatccccccccgacacccgttttgggaatgggtgacgtgcgacaacgaaattgcccgaaaccacccaaaacatgagttttggacctaaagtagtggattgggtatgttcgttacgaaaaacgaaataatggttccggtggcaaaaactcgtgcttttatgcaccagacaattgttttaggaatgagtgacgtgcgacaaggaaattgcgcgaaaccacccaaaacatgagttttggacgtaaagtagtggattgggcatgttcgttacgaaaaacgaagaaatggttccggtggcaaaaactcgtgcttttatgcacctgacactcgttttcggaatgagtgacgtgcggcaacgaaattgcgcgaaaccacccaaaacatgagttttggacctaaagtagtggattgggcatgttcgttgcgaaaaaagaaaaaaaggaaccggttccaaaggcaaaaacttgtgctttgtatgcccccgacacccgttttcggaatgggtgacgtgcgacaacgaaattgtgcgaaaccaccccaaacatgagttttggacctaaagtagtggattgggcatgttcgttgcaaaaaacgaagaaatggttacggtggcaaaaactcgtgctttgtatgcacccccacacccgttttcggaatgggtgacgtgcgacaacgaaattgcgcgaaaccaccccaaacatgagttttggacctaaagtagtggattgggcatgttcgttgcgaaaaacaaagaaatggttccggtggcaaaaactcgtgctttgtatgcaccccgacaaccgttttcagaatgggtgacgtgcggcaacgaaattgcgtgaaaccaccccaaacatgagttttggacctaaagtagtggattgggcatgttcattgcgaaaaataaagaaatggttccggtggcaaaaactcgtgctttgtatgcacccgacacccgttttcggaatgggtgacgtgcgacaacgaaatcgcgagaaatcaccccaaacatgagttttggacctaaagtagtggattgggcatgttcgttacgaaaaacgaagaaatggttccggtggcaaaaactcgtgctttgtatgaccccgacacccgttttcggaatgggtgacgtgcgacaacgaaattgcgcgaaaccaccccaaacatgagttttgtacctaaagtagtggattgggcatgttcgttgcgaaaaacgaagaaatggttccggtggcaaaaactcgtgcttttatgcacccgacactcgttttcggaatgagtgacgtgcgacaacgaaattgcgcgaaaccacccgaaacatgagttttgtacctaaagtagtggattgggcatgttcgttgcgaaaaacttagaaatagttccggtggcaaaaactcgtgctttgtatgcaccccgacaaccgttttcagaatgggtgacgtgcggcaacgaaattgcgtgaaaccaccccaaacatgagttttggacctaaagtagtggattgggcatgttcattgcgaaaaataaagaaatggttccggtggcaaaaactcgtgctttgtatgcacccgacacccgttttcggaatgggtgacgtgcgacaacgaaattgcgagaaaccaccctaaacatgagttttggacctaaagtagtggattgggcatgttcgttgcgaaaaacgaagaaatggttccggtggcaaaaacttgtgctttgtatgcaccccgataatcgttttcggaatcggtgacgtgcggcaacgaaattgcgcgaaaccaacacaaacatgagttttggacctaaagtagtggattgggcatgttcgttgcgaaaaacgaagaaatggttccggtggcaaaaactcgtgctttgtatgcacccccacacccgttttcggaatgggtgacgtgcgacaacgaaattgcgtgaaaccaccccaaacatgagttttggacctaaagtagtggattaagcatgttcgttgcgaaaaacgaagaaatggttccggtggcaaaaactcgtgctttgtatgcacccgacacccgttttcggaatgggtgacgtgcgacaacgaaattgtgcgaaaccacaccaaacatgagttttggacctaaagtagtggattgggcatgttcgttgcgaaaaacgaagaaatggtttcggtggcaaaaatgatgtagctgaggtgcccgatctttcggcgagtagagataattccgatttggcggaagatgacccttgcgatccgactacgacgagcaagcccgaggcgccaatgcaatcgctgaaccaactccctgtggttaccgaccttgctgatgcgagatcggcctgatcacgaagatcgtttcctgtgcgtaatcgaagaacgaacaagaaaaagatgcgagcaatctaatctattactcgagggtggagttctgaatacacgaagacagcgcagatttgcgcgtgttcgagagtagctaaggctaacgtaaaacaaaactcagaaaataaaggaggcgcagctcctgaataaatagagagggggcgcagcccctaggggcggccaaccctaggtcgtccattatgggccgcaattgggctggtcgtctatccttccgggccttcgttctttaacaacatgatgtagttcaattctcttgcacgagcccgagtcactggcccaggtggaaggggtggcgcctgggctggagaaggtgctgctggtgtagatgtgctcgtgttggtgttgatgtccgcatcatcctccccttcttgaactgaagtcgtcctcgacggcaactcctcatcttctctcgcatacggtttcaaatctgcaacattaaaactagtggaaacaccaaactccgcaggcaggtcaaggatataagcattatcattaatcttggttagtaccttaaaaggaccagcagcacgaggcatcaatttagaacggcgcaaagtaggaaaacgatcctttctcaaatgcaaccaaaccatatcaccaggttcaaaagtaacatgttttcttcctttactaccagcaacatgattttttgcattagtagcagcaatgttctgtttcgtttgttcatgtatggtaatcatttgttcaatatgtgcagaagcatctacatgtggggcgttcgcagcattaagtgaaatcaaatcaataggtgccctaggaatgtaaccataaactatctggaaagggcacatctttgtagaagaatgcgtggcatgattgtaagcaaattcaacatgaggcaagcaatcctcccaacgtctcaaattcttgtctaaaacagccctaagcatggtagataaagttctatttactacctcagtttgtccatcagtctgagggtgacaagtagtgctaaacaacaatttagttcccaatttattccaaagagatctccaaaaatggcttagaaacttagcatcgcgatcagagactatggtttttggaataccatgtaaacgaataatttctctaaagaacaattcagcaacaatgctagcatcatcagttttatgacaaggtataaagtgagccattttagagaatctatcaacaaccacaaaaatactatccctccccttcttagttctaggcaagcccaaaacaaagtccatagagatatcaagccaaggagaagaagggacaggcaaaggcatatacaaaccatggttgttcaaccgtgacttagctttctgacaagtagtgcagcgtgcaacaaggcgctcaacatcagcacgcatctgaggccaaaagaagtgggcagccaacacctcatgcgttttgtagacgccaaaatgccccatgagaccgcctccatgtgcctcctgtaacaacaaaagacgaaccgaactagctgaaatacacagcttgttagcgcgaaacaagaacccatcttgtatgtgaaatttgccccatggtatcccattaatacaatggccgaaagcatctttaaaatcagcatcgtcaacatattgatccttcacagtgtccaaaccaaagattttaaaatctaattgtgacagcatggtatagcgacgagacaaagcatcagcaataacattgtccttcccgttcttgtgtttaataatgtaaggaaaggactcaatgaattcgacccatttagcatgacgacggttcagatttgtttgggtacgaatatgttttaaagcctcatgatcagaatgaattatgaactcacgatgccaaagatagtgctgccatgtatgcaaagtgcgcactaaagcgtaaagctccttatcataagtagaatatttcagactagcaccgcttaatttttcactaaaataagcaactggttttccttcttgtaacaaaacagcacctagcccaataccgctagcatcacattcaagctcaaaaactttattaaaatcaggcaattgcaagaggggagcttgggttaacttatctttcaaagtgctgaacgctacctcctgcgaatcactccaagcaaacggcacatctttctttgtaagctcatgtagaggcgctgcaatggagctaaaatcacgaacaaatctgcggtagaaaccggcaagtccaagaaagctcatttgtgtgaccgtcgtcggtgtaggccactcccgaatggcagcaatcttgctgctatccacctcaatgccctgtggagtaaccacataaccaagaaacgagacacgttgcgtgcaaaatgtgcacttttccatgttaccaaacaagcgagcagcacgcaaagcatcaaaaacagcacgcaaatgttctaaatgctcctctatagacttgctataaataaggatatcatcgaaataaacaacaacaaacaaacctatgaaggcccgtagaacttcgttcattaaacgcgtggaataggatatcgataacgaactgtgatgttattaatagcacgacaatctacgcacatacgccatgacccatctttctttggaacgagtaaaacaggaaccgagcaagggctaagagactcacgaatgtaacccttatcaagcagcgtctgcacctggcgctggatctccttcgtctcctctggatttgtacggtacggggcgcggttcggaagagaagcgccggggatgagatcgatctgatgctcaatgccacagaggggaggaagacctggtggtaagtccgtaggataaacatcagcatactcctgcaaaaggttaacaacagcagggggtatatccaaagacggtgcatcatcaagcggaacaagcatgcgcgagcatacaagtgcataacagggcatatgagcttcatggagatcatcaaaatcagcacgtgtagcaagtaaaacaggagagtgcaacttgatttcagatttaataggtgcggctgatgtcgatttgacttgttgtgcagttttagcagccctagtaagatcatctttcaaaatttggtcaggggtcattggatgtataattattttctggcctttaaacatgaaagaataatgatttgaacgaccatgatgtaaactatcagtatcatattgccaaggtcgacctaataacaaagagcatgcttccataggaataacatcgcaatcagcataatcagaataagaacccagcgaaaaggggacacgtaccgaacgtgttacctttattttaccaccatcattaagccattgaatgtgatacggatgtggatgtgtgcgagtgggcaaggataatttctctaccaacgctgtacttgccaaattgttgcagctgccactatcgatgatgatgcgaatcgaccgttcgtgcacgacgcccttggtatggaatagagtgtgtcgctgatttttttcggcctgggcaacctgtgtgctgagaacacgctgcacaacctgtctcttatacacatctcaaccctgaagctcttgttggctagtgcgtagtcgttggcaagctctagaggatccccacggcttcccgtgggacgtgtagcagcacgcaagcacttctcaatgcagcaggcacaggatgcccgcacgaacgatgggacacgggcgccgggagtcggctgcacggcagcgggggtcctccaagcagtcacgggtccaagacaactcatgcgccagcgtagccgctacggtcgagccatccaaagcatccctccgcgctgggcgcggcgggtctacttgcgaggacggcgaccgaaggtccaccgagcacgggagaaatggaaaacgcatcgagcaacgggccatcccacagtgcagccactcgtccagggcgtctggccggcgctagccagccatagccggtcgtggctgcgtcacggccgaaccatggccggccaggcagccaacagcgccagctggagctgggcgcggtagggtgctgaccggccacggctaggccgcgagggggtgcggggctcggccgaggagacctggaggagacgctggaaacgctatggtttcagcagcgttccgcccgggtttcggctgcacgagttccctaccccctactatacctgaggggcataccccctcccaggacttcggggagttcagccttcagaaaaccagggtattttccctggacgccacgaaacccatctaagatggccggacacaacgtttttgctcagaatcaggggtttcgctagcgtgacccgttttccctcacgggtcgacccgaacttcgatgtctcacgcggggggaccacgggagggtcccgtgcccttccacgtgcccgtttttgcggccgtggccgaaaatccgtttttggcccgtgcgccatggcgaacccctcgttttcagcccaaacgcaaggccgaacagccctgccacccgtggcagcgcgcctccgagccgttttccctccgttccaccgtgcccttcactcaagacatgcactttaggttcggtgtctttccacatgcttggacttagcttattttcggggtcgtgcccgagcctcagttttcggcccgtgcgccatggcgaacccctcgttttcagcccaaacgcaaggccgaacagccctgccgcctgtggcagcgcgcctcctcccgttttccctccgttccaccttgcccttcactcaagacatgcactttaggttcggtgtctttccacatgcttggacttagcccgtttttgcggccgtggccgaacctcagttatcagcccgcgcgccatggcgaacacctcgttttcagcccaaacgcaaggccgaacagccctgccgcccgtggcagcgcgcctcctcccgttttccctccgttccaccttgcccttcactcaagacatgcactttaggttcggtgtctttccacacgcttggacttagcccgttttcgcggccgtggccgaacctcagttttcagcccgcgcgccatggcgaacacctcgttttcagcccaaacgcaaggccgaacagccctgccgcccgtggcagcgcgcctcctcccgttttccctccgttccaccttgcccttcactcaagacatgcactttaggttcggtgtctttccacacgcttggacttagcccgttttcgcggccgtggccgaacctcagttttcagcccgcgcgccatggcgaacacctcgttttcagcccaaacgcaaggccgaacagccctgccgcccgtggcagcgcgcctcctcccgttttccctccgttccaccttgcccttcactcaagacatgcactttaggttcggtgtctttccacatgcttggacttagcttattttcggggtcgtgcccgagcctcagttttcggcccgcgcgccatggcgaacacctcgttttcagcccaaacgcaaggccgaacagccctgccgcccgtggcagcgcgcctcctcccgttttccctccgttccaccgtgcccttcactcaagacatgcactttaggttcggtgtctttccacatgcttggacttagcttattttcggggtcgtgccctagcctcagttttcggcccgtgcgccatggcgaacccctcgttttcagcccaaacgcaaggccgaacagccctgccgcccgtcgccacgcgcctgctcccgttttccctccgttccaccttgcccttcacttaagacatgcactttaggttcggtgtctttccacaagcttggacttagctaattttggaggtcgtgcccgagcctccgatttcggcccgtgcgccatggcgaacccctcgttttcagcccatacgcaaggccgaacagccctaccgcccgttgccgcgtgcctccgtgtcgttttccctccgttccaccgtgcccttcaccaaagacatccactttaggttcggtgtgtttccacatgcttggacttagtttattttcgggttcgtgccacagccaccatttccggcccgcgcgccatggcgaaccacctgtttttagcccagacgcattgccgaacagccctgccgcccgtcgccgcgggcctccgtgtcgttttccctccgttccatcttgcccttcacccaagacatacacattagcttcggtgtctttccacacgcttggacttagcttatttccgaggccgtgccccagccgctgttttcggcccacgcgccatggcgaaaccctcgttttcagcccaaacgcaaggccgaacagccatgccgcccgtcgccgcgcgcctccgtgtcgttttccctccgttccaccgtgcccttcacccaagacatacacattagcttcggtgtctttccacacgcttggacttagcttatttccgaggccgtgccccagccgccgttttcggcccgcgcgccatggcgaaaccctcgttttcagcccaaacgcaaggccgaacagccatgccgcccgtcgccgcgcacctcctcccgttttccctccgttccaccttgaccttcactccagacatgcactttaggttcggtgtctttccaaacgctgggacttagcccgttttcggaccgtggccgaaccgttgttttcggaccacgcgccatggcgaacacctcgttttcagcccaaacacaaggacgaacatccctgccgcccgtcgccgtgcgcctccgtgccggagcctcagttcgtcgcgtgcctccgtgtcgttttccctccgttccactgtgcccttcaccaaagacatacactttaggttccgtgtctttccacacgcttggacttagcttattttcgagttcgtgcctgagcctcagttttcggcccgtgcgccatggcgaacacctcgttttcagccaggacgcaaggccgaacagccatgccgcccgtcgtcgcgtgcctccgtgtcgttttccctccgttccaccgtgcccttcactcaagacatacaaacaccttagcttcggtgtctttccattccacacgcttggacttagcttattttcgaggtcatgcccgagcctcagttttcggcccgtgcgccatggcgaacccctcgttttcagcccagacgcaaggccgaacagccctgccgcccgtcgccgcgcgcctccgtgccgttttccctctgttcctccgtgcccttcacccaagacatacatattagcttcggtgcctttccacacgcttggacttagcttattttcggggtcgtgcctgaacctcatttttcggcccgtgcgccatggcgaacccatcgttttcggcccaaacgcaaggccgaacagccatgccgcccgtcgtcgcgcgcctccgtgtcgttttccctccgttccaccgtgcccttcactcaagacatacatacaccttagcttcggtgtctttccattccacacgcttggacttagcctattttcgaggtcgtgccccggtcgccgtttgcggcccgcgcgccatggcgaacccctcgttttcagcctagacgcgtggccgaacagccctgccgcccatcgccaacgttccatcgtgcccttcacccaaggcatacgtaggagcttcggtttctttccacacgctgggacttagcttttcttgtggtcgtgcacgaactcacggcggttttcggcctcttgccacgctgcgccttggacgtttccgttcggaagatcggtgcccctctcccgtgggttcgaaacctagtcgctgggcgctgtgtagagtggggggagggacgaatccgtgcgacgcggggctggatctcagtggatcatggcagcaaggccactctgccacttacaatgccccgtcgcgttttaagtcgtctgcaaaggattcagcacgccgcccgttgggaagggagcttcgaggcggcccgccgcggcgcgtcgaccgggcgggctgagccaatggcacgggcccttggggcgcgaacgccctaacgtgggtcggggcgggcggcgagcagaggcgccggttgctagcttggattctgacttagaggcgttcagtcataatccggcacacggtagcttcgcgccactggcttttcaaccaagcgcgatgaccaattgtgtgaatcaacggttcctctcgtggagcttcggtccgggtcacctttgtccaccaagatggaactgcggccggccgctcattaattaagtcaggcgcgcctctagttgaagacacgttcatgtcttcatcgtaagaagacactcagtagtcttcggcca

SEQ ID NO: 762 - DNA, 17354 bp, Zea mays
  source (0)...(0): Zea mays BAC clone full insert sequence contig bacm.pk135.l06.fis18
tcgcaacgaacatgctcaatccactactttaggtccaaaactcatgtttggggtggtttcgcgcaatttcgttgccgcacgtcacccattctgaaaacggttgtcggggtgcatacaaagcacgagtttttgccaccggaaccatttcttcgtttttcgcaacgaacatgcccaatccactactttaggtacaacactcatgtttggggtggtttcgcgcaatttcgttgccgcacgtcacccattccgaaaacgggtgtcgggtgcataaaagcacgtgtttttgccaccagaactatttcttcgtttttcgcaacgaacatgcccaatccactactttaggtccaaaactcatgtttggggtggtttcgcgcaatttcgttcccgcacgtcacccattctgaaaacggttgtcgggggtgcatacaaagcacgagtttttgccaccggaaccatttcttcgtttttcgcaacgaacatgcccaatccactactttaggtccaaaactcatgtttgggctgctttcgcgcaatttcgttgccgcacgtcacccattccgaaaacggttgtcggggtgctttggccctgctaatgaagttaagatctctggcacgggcccgagtgattggcccagctaatgaagttaagatctctggcacgggcccgagtgattggcccagctaatgaaggaagtggcgcttgatgtggaggtgctgctggtgtagtcgtactcatagtgatgtcctcatcagtgcatacaaagcacgagtttttgccaccgaaaacatttctttgtttttcgcaacgaacatgcccaatccactactttaggtccaaaactcatgtttcgggtggtttcgcgcaatttcgttgccgcacgtcacccattctaaaaacgggtgtgggggtgcatacaaagcacgagtttttgccaccggaacagtttcttcgtttttcgcaacgaacatgcccaatccactactttagatccaaaactcatgtttggggtgatttctcgcaatttcgttgtcgcaagtcacccattccgaaaacgggtgtcgggtgcatacaaagcacaagttttttgccaccggaaccatttcttcgtttttcgtaacgaacatgcccaaaccactactttaggtctaaaactcatgtttggggtggtttcacgcaatttcgttgccgcacgtcacccattctaaaaacggttgtcggggtgcatacaaagcacgagtttttgccaccggaaccatttcttcgtttttcgcaacgaacatgcccaacccactactttaggtccaaaactcatgtttggggtggtttcgcgcaatttcgttgccgcacgtcacccattcggaaaacggttgtcggggtgcatacaaagcacgatttttgccaccggaaccatttcttcgtttttcgcaacgaacatgcccaatccactgctttaggtacaaaactcatgtttggggtggttcgcgcaatttcgttgccgcacgtcactcattccgaaaacgagtgtcgggtgcataaaagcacgagtttttgccaccggaaccattttttcgttttttcgtaacgaacatgcccaatccactactttaggtccaaaactcatgtttggggtggtttcgcgcaatttcgttgccgcacgtcacccattccgaaaacgggtgtcgggtgcatacaaagcacgagtttttgccaccggaaccatttcttcgtttttcgcaaagaacatgcccaatccactactttagatccaaaactcatgtttgaggtggtttcgcgcaatttcgttgtcgcacgtgacccattctgaaaacgggtatcggggtgcataaaagcacgagtttttgccaccggaaccatttctttgtttttcgtaacgagcatgcccaatccactactttaggtagaaaactcatgtttggggtggtttcgcacaatttcgttgtcgcacgtcactcatttcgaaaacgggtgtcgggttcatacaaagcacgagtttttgccaccggaaccatttcttcgtttttcgcaacgaacatgcccaatccactactttagatccaaaactcatgtttggggtggtttcgcgcaatttcgttgtcgcacgtcacccattccgaaaacgggtgtcgggtgcatacaaagcacgagtttttgccaccggaaccatttcttcgtttttcgcaacgaacaagccgaatccactactttaggtccaaaactcatgtttggggtggtttcgcgcaatttcgttgccgcacgtcactcattccgaaaacggttgtcggggtgcatacaaagcacgagtttttgccaccggaaccatttcttcgtttttcgcaacgaacatgcccaatccactactttaggtccaaaactcatgtttggggtggtttcgcgcaatttcgttgtcacacgtcacccattccgaaaacggttgtcggggtgcatacaaagcacgagtttttgccaccggaaccatttcttcgtttttcgcaacgaacatgcccaatccactactttaggtccaaaactcatgtttggggtgatttctcgcaattttgttgtcgcacgtcacccattccgaaaacgggtgtcgggtgcatacagagcacgagtttttgccaccggaaccattcttcgtttttgcaacgaacatgcccaatccactactttaggtccaaaactcatgtttggggtggtttctcgcaatttcggtgtcgcacgtcacccattccgaaaacgggtgtcgggtgcatacaaagcacaagtttttgccaccggaaacatttttttgtttttcgcaacgaacatgcccaatccactactttaggtccaaaactcatgtttggggtggtttcgcgcaaaatcgttgccgcacgtcacccattccgaaaacggttgtcgagggtgcatacaaagcacgagtttttgtcaccggaaccatttcttcgtttttcacaacgaacatgcccaatccactactttaggtacaaaactcatgtttggggtggtttcgcgcaatttcgttgtcacatgtcacccattccgaaaacgggtgtcggggtgcatacaaagcacgagtttttgccaccggaaccatttcttcgttttttgcaacgaacatgcccaatccactactttaggtccaaaactcatgtttgggctggtttcgcgcaatttcgttgtcgcacgtcacccattccgaaaacgggtgtcgggtgcatacaaagcacgagttttttccaccggaaccatttcttcgtttttcgcaacgaacatgcgcaatccactactttaggtccaaaactcatgtttggggtggtttcgcgcaatttcgttgccgcacgtcacccattccgaaaacggttgtcgggggtgcatacaaagcacgagtttttgccaccggaaccatttcttcgttttttcacaacgaacatgcccaatccactactttaggtccaaaactcatgtttggggtggtttcgcgcaatttcgttgtcacacgtcacccattccgaaaacgggtgtagggggtgcatacaaagcacgagtttttgccaccggaaccatttcttcgtttttcgcaacgaacatgcccaatccactactttaggtccaaaacacatgtttgaggtggtttctcgcaatttcgttgtcgcacgtcacccattccgaaaacgggtgtcgggtgcatacaaagcacgagtttttgccaccggaaccatttcttcgtttttcgcaacgaacatgctcaatccactactttaggtccaaaactcatgtttggggtggtttcgcgcaatttcgttgccgcacgtcacccattctgaaaacggttgtcggggtgcatacaaagcacgagtttttgccaccggaaccatttcttcgtttttcgcaacgaacatgcccaatccactactttaggtacaacactcatgtttggggtggtttcgcgcaatttcgttgccgcacgtcacccattccgaaaacgggtgtcgggtgcataaaagcacgagtttttgccaccagaactatttcttcgtttttcgcaacgaacatgcccaatccactactttaggtccaaaactcatgtttggggtggtttcgcgcaatttcgttcccgcacgtcacccattctgaaaacggttgtcgggggtgcatataaagcacgagtttttgccaccggaaccatttcttcgtttttcgcaacgaacatgcccaatccactactttaggtccaaaactcatgtttgggctgctttcgcgcaatttcgttgccgcacgtcacccattccgaaaacggttgtcggggtgcatacaaagcaagagtttttgccaccagaaccatttcttcgtttttcacaacgaacatgcccaatccactactttaggtacaaaactcatgtttggggtggtttcgcgcaatttcgttgtcacacgtcacccattccgaaaacggttgtcggggtgcatacaaagcacgagtttttgccaccggaaccatttcttcgtttttcgcaacgaacatgcccaatccactactttaggtccaaaactcatgtttggggtgatttctcgcaatttcgttgtcgcacgtcacccattccaaaaacgggtgtcgggtgcaaacaaagcacgactttttgccaccggaaccatttcttcgtttttgcaacgaacatgcccaatccactactttaggtccaaaactcatgtttggggtggtttctcgcaatttcggtgtcgcacgtcacccattccgaaaacgggtgtcgggtgcatacaaagcacgagtttttgccaccggaaccatttcttcgtttttcgcaacgaacatgcccaatccactactttaggtccaaaactcatgtttgggatggtttcgcgcaaaatcgttgccgcacgtcacccattccgaaaacggttgtcgagggtgcatacaaagcacgagtttttgccaccggaaccatttcttcgtttttcgcaacgaacatgcccaatccactactttaggtacaaaactcatgtttggggtggtttcgcgcaatttcgttgtcacacgtcacccattccgaaaacgggtgtcggggtgcatacaaagcacgagtttttgccaccggaaccatttcttcgtttttcgcaacgaacatgcccaatccactaatttaggtccaaaactcatgtttgggctggtttcgcgcaatttcgttgtcgcacgtcacccattccgaaaacgggtgtcgggtgcatacaaagcacgagtttttgccaccggaaccatttcttcgtttttcgcaacgaacatgcccaatccactactttaggtccaaaactcatgtgtggggtggtttcgctcaatttcgttgccgcacgtcacccattccaaaaacgattatcggggtgcatacaaagcacaagtttttgccaccggaaccatttcttcgtttttcgcaacgaacatgcccaatccactactttaggtccaaaactcatgtttagggtggtttctcgcaatttcgttgtcgcacgtcacccattccgaaaacgggtgtcgggtgcatacaaagcacgagtttttgccaccggaaccatttcttcgtttttcgcgacgaacatgcccaatccactactttaggtccaaaactcatgtttggggtggtttcgcgcaatttcgttgccgcacgtcacccattccgaaaacggttgtcgggggtgcataaaaagcacgagtttttgccaccggaaccatttcttcgttttttcgcaacgaacatgcccaatccactacttcaggtacaaaactcatgtttggggttgtttcgcgcaatttcgttgtcacacgtcacccattccgaaaacgggtgtcgggtgcatacaaagcacgagtttttgccaccggaaccatttcttcgtttttcgcaacgaacatgcccaatccactactttaggtacaacactcatgtttggggtggtttcgcgcgatttcgttgccgcacgtcacccattctgaaaacggttgtcgggggtgcatacaaagcacgagtttttgccaccggaaccatttcttcgtttttcgcaacgaacatgcccaatccactactttaggtacaaaactcatgtttggggtggtttcgcgcaatttcgttgccgcacgtcactcattccgaaaacgagtgtcgggtgcataaaagcacgagtttttgccaccggaaccatttcttcgtttttcgtaacgaacatgcccaatccactactttaggtccaaaactcatgtttggggtggtttcgcacaatttcgttgtcacacgtcacccattcccaaaacgggtgtcgggtgcatacaaagcacgagtttttgccaccggaaccatttcttcgtttttcgcaacgaacatgcccaatccactactttaggtccaaaactcatgtttggggtggtttcgcgcaatttcgttgccgcacgtcacccattccgaaaacggttgtcggggcgcatacaaagcacgagtttttgccaccggaaccatttcttcgtttttcgcaacgaacatgcccaatccactaccttaggtccaaaactcatgtttggggtggtttcgcgcaatttcgttgtcacacgtcacccattctgaaaacgggtgtcgggtgcatacgaagcacgagtttttgccaccggaaccatttcttcgttttttgcaacgaacatgcccaatccactactttaggtccaaaactcatgtttggggtggtttctctcaatttcgttgtcgcacgtcacccattccaaaaacgggtgtcgggtgcatacaaagcacgagtttttgccaccggaaccatttcttcgtttttcgcaacgaacatgcccaatccactactttaggtccaaaactcatgtttggggtggtttcacgcaaattcgttgccgcacgtcacccattccgaaaacggttgtcgagggtgcatacaaagcacgagtttttgccaccggaaccatttcttcgtttttcgcaacaaacatgcccaatccactactttaggtccaaaactcatgtttggggtggtttcgcgcaatttcgttgccgcacgtcacccattctgaaaacggttgtcggggtgcatacaaagcacgagtttttgccaccggaaccatttcttcgtttttcgcaatgaacatgcccaatccactactttaggtacaacactcttgtttggggtggtttcgagcaatttcgttgccgcacgtcacccattccgaaaacgggtgtcgggtgcataaaagcacgagtttttgccaccagaactatttcttcgtttttcgcaacgaacatgcccaatccactactttaggtccaaaactcatgtttggggtggtttcgtgcaatttcgttcccgcacgtcacccattctgaaaacggttgtcgggggtgcatacaaagcacgagtttttgccaccggaaccatttctacgtttttcgcaacgaacatgcccaatccactactttaggtccaaaactcatgtttggggtggtttctcgcaatttcgttgtcgcacgttgatgaggacatcactatgagtacgactacaccagcagcacctcaacatcaagcgccacttccttcattagctgggccaatcactcgggcccgtgccagagatcttaacttcgtcattgtactaaagaatgagggcccagaagaatagacgaccagccccactgcagcccatagtggacgacctagggttggccgcccctaggggctgcgccccctctctatttaaacaggagttgcgcctcctttgttctccgagttttgttttacgttagctttagctactctcaaacacgcgcaaatctgcgctgtcttcgtgtattcagaactccaccctcgagtaatagattagattgctcgcatctttttcttgttcgttcttcgattgcgcacaggaaacgatcttcatgatcaggccgatctcgcatcagcaaggtcggtaaccagagggagttggttcagcgattgcattggcgcctcgggcttgctcgtcgtagtcggatcgcaagggtcatcttccgccaaatcggaattatctctactcgccgaaagatcgggcacctcagctacatcaattggtatcagatttctaggttgatcggtgagtttatcgagtgtttttttctcctacagtccacaaaaccacataaaaattcaggaaaataaagaaaaaaattcgtcaaagttctcgcacgcttttcatagaacttcctgattttctatagaccacatctgatatctgttttaggtgaaacttcgtgtagctcctatcttgttgcttcttgtgctgagaaaaatatcaaaaaaataatacaaaaaaaagaaaaacaaaatcacatgtgattcctactagtgcctttttggcatcactagtacaatatttacggtactgccattttgctagttccatccgtcccttgcacctgtggccagcaatatagtttcgtgttttgcactataattcaactttgcattattgttttgatcgtgctaatccttgacttgagtgcagcctacccagaactccacatatttctacgacgagcaggtttctgtatctccacgcaatcgctcatccaatctttcaccggttccacctgttgattgcagttcaccactgtggcttggtaagaacgtataagaacttgataacagcattccatcgagcgagcaagttgtcaccaccattcccctgttgtcgtcggtttttctccttttggtgttttggtgtttgcgctaactatggcaggagcacacgacatggtggatgcccagttgcaggaagtaaggggacaagttgatggacttgctgctgacattaggacgatgcatgaacggcttgattcaacgatcacttcgacgaccgagcgtttcaaccaacttgaccttgctcaaacggcgactcgcaccacactcgacaccatcctggcacgccttgatgcattgaccacaaagctggagcaagaatacggcggtgacactgagcaggacgatggagatcgccgtggtcgtgcacgtcgtgtggttcgtcatccccctaatgacttattttctaagattaaatttaaaattccatcttttaatggtaaatatgatcctgctgcatatcttgattgggaattagaggtagaacagaaattttcatgccatgatattcctgctaatagccaagtgaaggctgccattagtgaatttactgattttgctttaatttggtggcgtgagtataaacaaaaacttcccattaacagtgtcattacttggacccaattaaaaactgccatgcgccacagatttgttccttcctattatgctcgtgatttgcttaacaaaatgcagcgttttcaacaaggttcacaatctgttgaggaatattaccaggagttacaaaagggtatgcttcgttgtggtttggttgagtcggatgacgctgctatggcgcgttttcgtggtggtttgaacagggaaattcaggatatacttgattataaggattattttgatataaccacattgtttgaatatgcttgcaaagctgaacgtgaagtgcagggacgacgatcaaagacatatactaactcttttgcaggccggggtccaacacacagctcaactccttctagccctgcaccttctacgcctagcactacatcgcgcacagggacgaccaagccagtggcgccccctgccaaaggcgccgcttcttccacaggacgtacacgggatattcagtgccatcgttgcagagggtttgggcacatgattcgggactgcccaaacaagcgtaccttgcttatacgtgacaatggtgagtactcttcagccagtgattctgaggaaactagtcatgctatgcttgccactaaccatgcagaaaatgaggaagtccacgttgatcccatcgacgccgataggtatgagagtcttgttgtgcagcgtgttctcagcacacaggttgcccaggccgaaaaaaatcagcgacacactctattccataccaagggcgtcgtgcatgaatggtcgattcgcatcatcatcgatagtggcagctgcaacaatttggcaagtacagcgttggtagagaaattatccttgcccactcgcacacatcctgatgaggacatcaacaccaacacgagcacatatacaccagcagcaccttctccagcccaggcaccatcttccccagtccaggcgccaccccttccacctgggccagtgactcgggcccgtgcaagagaattgaactacattatgctgttaaagaacgaaggcccggaagaatagacgaccagcccaactgtggcccataatggacgacctagggttggccgcccctaggggctgcgccccctctctatttatcaaggagctgcgcctcctttatttcttgagttttgttttacgttagccttagctactctcgaacacgcgcaaatctgcgctgtcttcgtgtattcagaactccaccctcgagtaatagattagattgctcgcatctttttcttgttcgttcttcgattgcgcacaggaaacgatcttcgtgatcaggccgatcttgcatcagcaaggtcggtaaccacagggagttggttcagcgattgcattggcgcctcgggcttgctcgtcgtagtcggatcgcaagggtcatcttccgccaaatcggaattatctctactcgccgaaagatcgggtacctcagcttcatcaattggtatcagatttccaggttgatcggtgagtttatcgagtgttttttttcctacagtccacaaaaccacataaaaattcaggttagaccttatcccaacacccttttgagcctcgcactttctttcaataatctgcattgttgaatttgtgtgctttcgcgtcatttgttgctggttgcattgtgttcttccaccattcaaaccctagcgccgccaccatctcccctttgatcacgccacaaactaagtcaacatcgtttccttgtttttctccttcggttacgtcaaaaaaaaaacagaaaaaacaaaccgagtcaacggccgtttccttgtttttctccttcggttacggaaaaaaaacagaaaaaaaacaaaccgagtcaacatcgtttccttgtttttctccttcggttacgtcaaaaaaaacagaaacaaaaaacaacgaaggagaaaggatacggttgtttcatcccggtcgtttgaaaacataacttgaggtaccttccttaaaccgggcataacttttcgctcgggtgtccaaaaaatctgaaatttttacaggagctagttgacaccattctgaggccggccaaactcaccttcggtctgtttggtttcgacaaaattgtcaaaaaaattcaggaaaataaagaaaaaaatccgtcaaagttctcgctcgcttttcagagaacttcctgattttctatagaccacatctgatctctgttttcggtgaaacttcgtctagctcctattttgttgcttcttgtgctgagaaaaatattaaaaaaatcatacaaaaagaaaaacaaaatcacttgtgattcctactagtggcctcgctagtacaatatttacggtactgccattctactagttccatccgtcctttgcacttgtgtccagcaatatagtttcgtgttctgcactataattcaactttgcattattgtttgattgtgctaatcattgacttgagtgcagcctacccagaactccacatatttctacgacgagcaggcttctgtttctccaggcaatcgctcatccaatctttcaccggttccacctgttggttgcagttcaccactgtggcttggtaagaacggataagaatttgataacaacactagtgtgagcgccttgtgagcagtacacccctgtttttgtcgttgtttttttcttcttcttttggtgttttggtgtttgcgctaactatggcaggagcacacgacacggtggatgcccagttgctggaagtaaggggacaagttgatggacttgctgatgacattaggacgatgcatgaacggcttaattcaacggtcacttcgacgaccgagcgtttcaaccagcttgaccttgctcaaacggcgactcgcaccacactcgacaccatcctggcacgccttgatgcgttgaccacaaagatggagcaggactacggcggtgacactgagtgggaagatggagatcgtcgtggtcgtgcacgccgtgtggttcgtcatccccctaatgacttattttctaagattaaatttaaaattccaccttttaatggcaaatatgatcctgctgcatatcttgattgggagttagaggttgaacaaaaattttcatgccatgatattgctgcacattctcaggttaaagatgctattagtgaatttactgattttgctttaatttggtggcgtgagtttaaaataaaacatcccactaccattccaaccacttgggatcagttgaaagctgcgatgcgacatcgatttgtgccttcgtattatgctcgtgatttgcttaataaaatgcagcgttttcagcaaggttctcaatctgttgaggactatttccaggagttacaaaaaggtatgattcgttgtgggatattagaggacaacgacgctgctatggcacgttttcgtggtggtttaaaccgcgaaatccaagatatacttgattataaggaatattatgatatgactactttatttgaatatgcttgcaaagctgaacgtgaagtgcagggatgccgctcgaagccatattctaacccttttgcaggacgaagctcgacatccacctcagcaccagttcctcctgcgccatccacgtccaccactactccacgcgagaagacgaccaaaccagccagcactgccccacccacaggtcgtacacgggatattcagtgtcatcgctgtagaggatttggccatgtgattcgggactgcccaaacaagtgcactttgctcattcgtgacgatggtgagtactcttccgctagtgattctgaagaaattgaacatgcactacttgccactgaccatgcagctaaagcggaggtacatgtcaacccgagcgacgctgataggtatgaaagtcttgttgtgcagcgtgttctcagtacacaggtcgctttgcccgagaagaatcagcgacacactctgttccatacaaagggtgttgtgcaggagcggtcaattcgcatcattatcgacagtggcagttgcaacaatttggcgagtaccatgctggtcgaaaagttatcgttacccactcgtaagcatccaaacccatatcacattcaatggctcaatgatggtggtaaaataaaaatcacacgttccgtgcgtgttcctttctccatgggtgcttattctgattttgttgattgtaatgttattcccatggaagcatgctctttgttacttggtcgaccttggcaatatgatactgatagcttgcatcatggtcgttcgaatcattattctttcatttttaagggtcagaaaataattatacatccaatgacacctgaacaaattgttcaagatgatcttgcccgagctgctataactgctaaacaacttgattcatcgccctctgttccttctgaaatcaagttgaagactcctgttttacttgctacacgtgctgattttgatgatctacacagtgctcatttgccatgctatgcacttatatgctctagtgtcctcatttcacttgatgatgcaccatctttggctattccccctatggttgctaaccttttgcaggagtacgctgatgtctttcccaaagacttaccaccgggtctcccaccacttcgtggcattgagcaccagatcgacctcattcccggcgcacagcttccgaaccgcgcaccgtaccgtacaaatccggatgagacgaaggagattcagcgccaggtacaggcgttgcttgacaagggatacattcgtgagtctcttagcccttgctctgttcctgtgttacttgttcccaagaaagatgggtcatggcgtatgtgtgtagactgtcgtgctattaataacatcactattcgttatcgatatcctataccacgccttgatgatatgctagatgagcttagtggtgccattattttcactaagattgatttgcgtagtggttaccaccagattagaatgaaactgggtgatgaatggaaaacgacttttaaaatgaaatttggtttatatgaatggttggttatgccgtttggattgactaatgctcccagcacttttatgcgagtgatgaatgaagttctaaggcccttcataggattgtttgtggttgtttattttgatgatattcttatttacagcaaatctaagaaagagcatttggaacatttacgtgctgtttttgatgcattgcgtgctgcccagttatttgctaacatggaaaaatgcatcttttgtacacgacgtgtctcgtttcttggttatgttgttactccacagggcattgaggtggatagcagcaagattgctgccattcgggagtggcctacaccgacgacggtcacacaaattcggagctttcttggacttgccggtttctaccgcagatttgttcgtgattttagctccattgcagcgcctcaacatgagcttacaaagaaagatgtgccatttgcttggagtgattccctggaggaagcgttcagcactttgaaaagataagttaacccaagctcccctattgcaattgcctgattttaataaagtgtttgagcttgaatgcgatgctagcggtattgggctaggtgctgttttgttacaagaaggaaaaccagttgcttattttagtgaaaaattaagcggtgctactctgaaatattctacttatgataaggagctttacgctttagtgcgcactttgcatacatggcagcactatctttggcatcgtgagtttataatccattctgatcatgaggctttaaaacatattcgtacccaaacaaatctgaaccgtcgtcatgctaaatgggtagaattcattgagtcctttccttacattattaaacacaagaacgggaaggacaatgttattgctgatgttttgtctcgtcgctataccatgctgtcacagttagattttaaaatctttggtttgcacactgtgaaagatcaatatgttgatgatgctgattttaaagatgctttcggccattgtattaatgggaaaccatggggcaaatttcacatacaggatgggttcctgtttcgcgctaacaagctgtgtgttccagctagctcggttcgtcttttgttgttacaggaagcacatggaggcggtctcatggggcactttggcgtctacaagacacatgaggtgttggctgcccacttcttttggcctcggatgcgcgctgatgttgagcgccttgttgcacgctgcactacttgtcagaaagctaagtcacggttgaacaaccatggtttgtatatgcctttgcctgttcctacttccccttggattgatatttcgatggattttgttttgggattgcctagaactaagaaggggaaggatatcatttttgtggttgttgatcgattctccaaaatggctcatttcataccttgtcataagactgatgatgctagcaatgttgctgaattgttttttagagagattattcgtttgcacggtattcccaatacaatagtctcggatcgtgatgctaagtttctgagtcatttttggagatctctgtggaataaattgggaactaaattgctgtttagcaccacttgtcaccctcagactgatggtcaaactgaggtagttaatcgaactttgtctaccatgcttagggctgttttagacaaaaattgaaacgttgggaggattgcttgcctcatgttgagtttgcttataatcatgcaacccattcttctacaaagatgtgcccttttcaaatagtttatggttacattcctagggcgcctattgctttgttttcgcttgatgctgcggacgccccacacatagatgctcttgcacatgttgaacaaatgattagtctccatgaacaaactcaacaaaacattgctgctgctaatgctaaatatcagattactggtagtaaaggccggaaactagttacttttgaacctggtgatatggtttggttgcatttgagaaaggatcgttttcctactttgcgtcgttctaaattgatgtctcgtgctgctggtccttttaagatactaaccaagattaatgataatgcttataccctcgacctgcctgcggagtttggtgtttccactagttttaatgttgcagatttgaaaccgtatgcgggagaagacgaggagttgccgtcgaggacgacttcagttcaagaaggggaggatgatgaggacatcaacaccaacacgagcacatctacaccagcagcaccttctccagcccaggcaccatcttccccagtccaggcgccaccccttccacctgggccagtgactcgggcccgtgcaaaagaattgaactacattatgctgttaaagaacgaaggcctggaagaatagacgaccagcccaactgcggcccataatggacggcctagggttggtcgccccaaggggctgcgccccctctctatttatccaggagctgcgcctcctttatttcttgagttttgttttacgttagccttagctactctcgaacacgcgcaaatctgcgctgtcttcgtgtattcagaactccaccctcgagtaatagattagattgctcgcatctttttcttgttcgttcttcgattgcgcacaggaaacgatcttcgtgatcaggccgatctagcatcagcaaggtcggtaaccacagggagttggttcagcgattgcattggcgcctcgggcttgctcgtcgtagtcggatcgcaagggtcatcttccgccaaatcggaattatctctactcaccgaaagatcgggtacctcagcttcatcacatccacatccgtatcacattcaatgcttaatgatggtggtaaaataaaggtaacacgttcggtacgtgtccccttttcactgggttcttattctgattatgctgattgcgatgttattcctatggaagcatgctctttgttattgggtcgaccttggcaatatgatactgatagtttacatcatggtcgttcaaatcattattctttcatgtttaaaggccagaaaataattatacatccaatgacccctgaccaaattttgaaagatgatcttactagggctgctaaaa

SEQ ID NO: 763 - DNA, 25770 bp, Zea mays
  source (0)...(0): Zea mays BAC clone full insert sequence contig bacm.pk135.l06.fis19
ctagcattgttgctgaattgttctttagagaaattattcgtttacatggtattccaaaaacaatagtctctgatcgcgatgctaagtttctaagccatttttggagatctctttggaataaattgggaactaaattgttgtttagcactacttgtcaccctcagactgatggacaaactgaggtagtaaacagaactttatctaccatgcttagggctgttttagacaagaatttgagacgttgggaggattgcttgcctcatgttgaatttgcttacaatcatgccacacattcttctacaaagatgtgccctttccagattgtttatggttacatccctagggcacctattgatttgattgcacttaatgctgcgaacgccctacatgtagatgctgctgcacatgttgaacaaatgataccatacatgaacaaacgaaacagaacattgctgctactaatgcaaaaaatcaggttgctggtagtaaaggaagaaaacatgttacttttgagccaggtgatatggtttggttgcacttgagaaaggaccggtttcctactttgcgccgttctaaattaatgcctcgtgctgctggtccttttaaggtgctaacaaagattaatgataatgcttatatccttgacctgcctgcggaatttgtgtttccactagttttaatgttgcagatttgaaaccatatatggccgaggatgcggagttgtcgtcgaggacgacttcacttcaagaaggggaggatgatgaggacatcactatgagtacgactacaccagcagcacctccacatcaagcgccacttccttcattagctgggccaatcactcgggcccgtgccagagatcttaacttcgtcatgctactgaagaatgagggcccagaagaatagacgaccagcccaactgcggcccatagtggacgacctagggttggccgccctaggggctgcgccccctctatttatccaggagctgcgcctcctttattttcgagttttgttttacgttagccttagctactctcgaacacgcgcaaatctgcgctgtcttcgtgtattcagaattccaccctcgagtaatagattagattgcttgcatctttttcttgttcgttcttcgattgcgcacaggaaacgatcttcgtgatcaggccgatctcgcatcagcaaggtcggtaaccacagggagttggttcagcgattgcattggcgcctcgggcttgctcgtcgtagtcggatcgcaagggccatcttccgccaaatcggaattatctctactcgccgaaagatcgggcacctcagctacatcatgcaccccgacacccgttttcggaatgggtgacgtgcgacaacaaaattgtgcgaaaccaccccaaacatgagttttggacctaaagtagtggattgggcatgttcgttgcgaaaaacgaagaaatggttccggtgtcaaaaactcgtgctttgtatgcacctccccgacaaccgttttcggaatgggtgacgtgcggcaacgaaattgcgcgaaaccaccccaaacataagttttggacctaaagtagtggattgggcatgttcgttgcgaaaaacgaagaaatggttccggtggcaaaaactcgtgctttgtatgcacccgacacccattttcggaatgggtgacgtgcgacaacgaaattgcgcgaaaccaccccaaacatgagttttggacctaaagtagtggattgggcatgttcgttgcgaaaaacgaagaaatggttccggtggcaaaaactcgtgctctatatgcacccgacacccgttttcggaatgggtgacgtggaacaacgaaattgcgagaaaccacaccaaacatgagttttggacctaaagtagtggattgggcatgttcgttacgaaaaacgaagaaatggttccggtggcaaaaactcgtgcttttatgcacccgacactcgttttcggaatgagtgacgtgcggcaacaaaattgcgtgaaaccaccccaaacatgagttttgtactgattgggcatgttcgttgcgaaaaacgaagaaatggttccggtggcaaaaactcgtgctttgtatgcaccctcgacaaccgttttcggaatgggtgacgtgcggcaacgaatttgcgcgaaaccaccccaaacatgagttttggacctaaagtagtggattgggcatgttcgttgcgaaaaacgaagaaatggttccggtggcaaaaactcgtgctttgtatgcacccgacacccgttttcggaatgggtgacgtgcgacaacgaaattgcgagaaaccaccccaaacatgagttttggatgtaaagtagtggattgggcatgttcgttgcgaaaaacgaagaaatggttccggtggcaaaaactcgtgctttgtatgcacccgacacccgttttcggaatgggtgacgtgcgacaacgaaattgtgcgaaaccaccccaaacatgagttttggacctaaagtagtggattgggcatgttcgttacgaaaaacgaagaaatggttccggtggcaaaaactcatgcttttatgcaccccgatacccgttttcagaatgggtgacgtgcgacaacgaaattgcgcgaaaccacctcaaacatgagttttggacctaaagtagtggattgggcatgttcgttgcaaaaaacgaagaaatggttccggtggcaaaaactcgtgctttgtatgcacctgacacctgttttcggaatgggtgacgtgcgacaacgaaattgtgtgaaaccaccccaaacatgagttttggacctaaagtagtggattgggcatgttcgttacgaaaaacgaagaaatggttccggtggcaaaaactcgtgcttttatgcacctgacactcgttttcggaatgagtgacgtgcggcaacgaaattgcgcgaaaccacccaaaacatgagttttggacctaaagtagtggattgggcatgttcgttacgaaaaacgaagaaatggttccggtggcaaaaactcgtgcttttatgcacctgacactcgtttttagaatgagtgacgtacggcaaccaaattgcgcgaaaccacccaaaacatgagttttggacctaaagtagtggattgggcatgttcgttgcgaaaaacgaagaaatggttccggtggcaaaaactcgtgcttttatgcacctaacactcgttttcagaatgagtgacgtacggcaaccaaattgcgcgaaaccacccaaaacatgagttttggacctaaagtagtggattgggcatgttcgttgcgaaaaacaaagaaatggttccggtggcaaaaactcttgctttttatgcacccgacacccgtttttggaatgggtgacgtgcgacaacgaaattgcgcgaaaccaccccaaacatgagttttggatgtaaagtagtggattggacatgttcgttgcgaaaaacgaagaaatggttctggtggcaaaaactcgtgctttgtatgcacccgacacccgtttttggaatgggtgacgtgcggcaacgaaattgcgcgaaaccaccccaaacatgagttttggacctaaagtagtggattgggcatgttcgttgcgaaaaacgaagaaatggttccggtggcaaaaactcgagctttgtatgcaccccgacaccatttttcggaatgggtgacgtgtgacaacgaaattgcgagaaatcaccccaaacatgagttttggacctaaagtagtggattgggcatgttcgttgcgaaaaacgaagaaatggttccggtggcaaaaactcgtgctttgtatgcaccccgacacccgttttcggaatgggtgacgtgtgacaacgaaattgcgcaaaaccaccccaaacatgagttttgtacctaaagtagtggattgggcatgttcgttgcgaaaaacgaagaaatagttccggtggcaaaaactcgtgctttgtatgcaccccgacaaccgttttcggaatgggtgacgtgcggcaacgaaattgtgagaaaccaccccaaacatgagttttggacctaaagtagtggattgggcatgttcgttacgaaaaacgaagaaatggttccggtggcaaaaactcgtgcttttatgcacccgacactcgttttcggaatgagtgacgtgcggcaacaaaattgcgcgaaaccaccccaaacattagttttgtacctaaagtagtggattgggcatgttcgttgcgaaaaacgaagaaatggttccggtggcaaaaactcgtgctttgtatgcaccctcgacaaccgttttcggaatgggtgacgtgcggcaacgaatttgcgcgaaaccaccccaaacatgagttttggacctaaagtagtggattgggcatgttcgttgcgaaaaacgaagaaatggttccggtggcaaaaactcgtgctttgtatgcacccgacacccgttttcggaatgggtgacgtgcgacaacgaaattgcgagaaaccaccccaaacatgagttttggacctaaagtagtggattgggcatgtttgttgcaaaaaacgaagaaatggttccggtggcaaaaactcgtgctttgtatgcacccgacacccgttttaggaatgggtgacgtgcaacaacgaaattgcgagaaatcaccccaaacatgagttttggacctaaagtagtggattgggcatgttcgttgcgaaaaacgaagaaatggttccggtggcaaaaactcgtgctttgtatgcaccccgacaaccgttttcggaatgggtgacgtgtgacaacgaaattgcgcgaaaccaccctaaacatgagttttcgacctaaagtagtggattgggcatgttcgttgcgaaaaacgaagaaatggttccggtggcaaaaactcgtgctttgtatgcaccccgacaaccgtttttggaatgggtgacgtgcggcaacgaaattgcgcgaaaccaccccaaacatgagttttggacctaaagtagtggattgggcatgttcgttgcgaaaaacgaagaaatggttccggtggcaaaaactcgtgctttgtatgcacccgacacccgttttcggaatgggtgacgtgcgacaacgaaattgcgcgaaaccaccccaagcatgagttttggatctaaagtagtggattcggcatgttcgttgcgaaaaacgaagaaatggttccggtggcaaaaactcgtgctttgtatgcacccgacacccgttttcggaatgagtgacgtgcgacaacgaaattgtgcgaaaccaccccaaacatgagttttggacctaaagtagtggatttggcatgctcgttacgaaaaacgaagaaatggttccggtggcaaaaactcgtgcttttatgcaccccgatacccgttttcagaatgggtgacgtgcgacaacgaaattgcgcgaaaccacctcaaacatgagttttggatctaaagtagtggattgggcatgttcttgcgaaaaacgaagaaatggttccggtggcaaaaactcgtgctttgtatgcacccgacacccgttttctgaatgggtgacgtgcggcaaagaaattgcgccaaaccaccccaaacatgagttttggacctaaagtagtggattgggcatgttcgttacgaaaaacgaagaaatggttccggtggcaaaaactcgtgcttttatgcaccccgacaaccgttttcagaatgggtgacgtgcggcaacgaaattgcgcgaaaccaccccaaacatgagtttcgtacctaaagtagtggattgggcatgttcgttgcgaaaaacgaagaaatggttccggtggcaaaaatcgtgctttgtatgtaccccgacaaccgttttcagaatgggtgacgtgcgacaacgaaattgtgcgaaaccaccccaaacatgagttttggacctaaagtagtggattgggcatgttcgttacgaaaaacgaagaaatggttccggtggcaaaaactcgtgcttttatgcactccgatacccgtttttagaatgggtgacgtgcgacaacgaaattgcgtgaaaccacctcaaacatgagttttggacctaaagtagtggattgggcatgttcgttgcgaaaaacgaagaaatggttccggtggcaaaaactcgtgctttgtatgcacccccgacacccgttttcggaatgggtgacgtgcgacaacgaaattgcgcgaaaccacccaaaacatgagttttggacctaaagtagtggattgggtatgttcgttacgaaaaacgaagtaatggttccggtggcaaaaactcgtgcttttatgcaccagacactcgttttcggaatgagtgacgtgcgacaacgaaattgcgcgaaaccacccaaaacatgagttttggacctaaagtagtggattgggcatgttcgttacgaaaaacgaagaaatggttccggtggcaaaaactcgtgcttttatgcacctgacactcgttttcggaatgagtgacgtgcggcaacgaaattgcgcgaaaccacccaaaacatgagttttggacctaaagtagtggattgggcatgttcgttgcgaaaaacaaagaaatggttccggtggcaaaaactcgtgctttttatgcacccgacacccgtttttggaatgggtgacgtgcgacaacgaaattgcgcgaaaccaccccaaacatgagttttggatgtaaagtagtggattggacatgttcgttgcgaaaaacgaagaaatggttccggtggcaaaaactcgtgctttgtatgcacccgacacccgttttcggaatgggtgacgtgcgacaacgaaattgttggaaaccaccccaaacatgagttttggacctaaagtagtggattgggcatgttcgttgcgaaaaacgaagaaatggttccggtggcaaaaactcgtgctttgtatgcaccccgacacccgttttcggaatgggtgacgtgcgacaacgaaattgcgcgaaaccacctctgatgtagctgaggagcccgatctttcagcgagtagagataattccgatttggcggaagatgacccttgcgatccgactacgacgagcaagcccgaggcgccaatgcaatcgctgaaccaactccctgtggttaccgaccttgctgatgcgagatcggcctgatcacgaagatcgtttcctgtgcgcaatcgaagaacgaacaagaacaagatgcgagcaatctaatctattactcgagggtggagttctgaatacacgaggacagcgcagatttgcgcgtgttcgaaagtagctaaggctaacgtaaaacaaaactcggaaaataaaggaggcgcagctcctgtataaatagagagggggcgcagcccctaggggcggccaaccctaggtcgtccattatgggccgcaattgggctggtcgtctattctttcgggccttcgttctttaacaacatgatgtagttcaattctcttgcacgggcccgagtcactggcccaggtggaaggggtggcgcctggactggggaagatggtgcctgggctggagaaggtgctgctggtgtagatgtgctcgtgttggtgttgatgtcctcatcatcctccccttcttgaactgaagtcgtcctcgacggtaactcctcatcttctcccgcatacggtttcaaatctgcaacattaaaactagtggaaacaccaaactccgcaggcaggtcaaggatataagcattatcattaatcttggttagtaccttaaaaggaccagcagcacgaggcatcaatttagaacggcgcaaagtaggaaaacgatcctttctcaaatgcaaccaaaccatatcaccaggttcaaaagtaactagtttccggcctttactaccagtaatctgatatttagcattagcagcagcaatgttttgttgagtttgttcatggagattaatcatttgttcaacatgtgcaagagcatctatgtgtggggcgtccgtagcatcaagcgaaaacaaagcaataggcgccctaggaatgtaaccataaacaatttgaaaagggcacatctttgtagaagaatgtgttgcatgattataagcaaactcaacatgaggtaagcaatcctcccaacgtttcaaatttttgtctaaaacagccctaagcatggtagacaaagttcgattaactacctcagtttgaccatcagtctgagggtgacaagtggtgctaaacagcaatttagttcctaatttattccacagagatctccaaaaatgactcagaaacttggcatcacgatccgagactattgtattgggaataccgtgcaaacgaataatctctctaaaaaacaattcagcaacattgctagcatcatcagtcttatgacaaggtatgaaatgagccattttggagaatcgatcaacaaccacaaaaatgctatccctccccttcttagttctaggcaatcccaaaacaaaatccatcgaaatatcaatccaaggggaagtaggaacaggcaaaggcatatacaaaccatggttgttcaaccgtgacttagctttctgacaagtagtgcagcgtgcaacaaggcgctcaacatcagcgcacatccgaggccaaaagaagtgggcagccaacacctcatgtgtcttgtagacgccaaagtgccccatgagaccgcctccatgtgcttcctgtaacaacaaaagacgaaccgagctagctggaacacacagcttgttagcgcgaaacaggaacccatcctgtatgtgaaatttgccccatggtttcccattaatacaatggccgaaagcatctttaaaatcagcatcgtcaacatattgatcttttacagtgtgcaaaccaaagattttaaaatctaactgtgacagcatggtatagcgacgagacaaagcatcagcaataacattgtccttcccgttcttgtgtttaataatgtaaggaaaagactcaatgaattctacccatttagcatgacgacggttcagatttgtttgggtacgaatatgttttaaagcctcatgatcagaatgaattatgaactcacgatgccaaagatagtgctgccatgtatgtaaagtgcgcactaacgcgtaaagctccttatcataagtagaatatttcagactagcaccgcttaatttttcactaaaataagcaactggttttccttcttgtaataaaacagcacctagcccaataccgctagcatcgcattcaagctcaaatactttattaaaatcaggcaattgcaataggggagcttgggttaacttatctttcaaagtgctgaacgcttcctcctgcgaatcactccaagcaaacggtacatctttctttgtaagctcatgtagaggcgctgcaatggagctaaaatcacgaacaaatctgcggtaaaaaccggcaagtccaagaaagctccgaatttgtgtgaccgtcgtcggtgtaggccactcccgaatggcagcaatcttgctgctatccacctcaatgccctgtggagtaacaacataaccaagaaacgagacacgtcgtgtgcaaaagatgcatttttccatgttagcgaataactgggcggcacgcaatgcatcaaaaacagcacttaaatgttccaaatgctctttcttagatttgctgtaaataaggatatcatcgaaataaacaaccacaaacaatcctatgaagggcctcagaacttcattcataactcgcataaaagtgctgggagcattagtcaatccaaacgacataaccaaccattcatataaaccaaatttcgttttgaaggctgttttccattcatcacctagtttcattctaatctggtggtaaccactacgcaaatcaatcttagtgaaaataatggcaccactaagctcatctagcatatcatcaaggcgtggtataggatagcgataacgaatagtgatgttattaatagcacgacagtctacacacatacgccatgacccatccttcttgggaacaagtaacacaggaacagagcaagggctaagagactcacgaatgtatcctttgtcaagcaacgcctgtacctggcgctgaatctccttcgtctcatccggatttgtacggtatggtgcgcggttcggaagctgtgcaccgggaatgaggtcgatctggtgctcaatgccacgaagcggtgggagacccggtggtaagtctttgggaaagacatcagcgtactcctgcaaaaggttagcaaccatagggggaatagccaaagatggtgcatcatcaagtgaaatgaggacactagagcatacaagtgcatagcatggcaaatgagcaccgtgtagatcatcaaaatcagcacgtgtagcaagtaaaacaggagccttcaacttaatttcagaaggaacagagggcgatggatcaagttgtttagcagttatagcagctcgggcaagatcatctttaacaatttgttcaggtgtcattggatgtataattattttctgacccttaaaaatgaaagaataatgattcgaacgaccatgatgcaagctatcagtatcatattgccaaggtcgaccaagtaacaaagagcatgcttccatgggaataacatcacaatcaacaaaatcagaataagcacccatggagaaaggaactcgcacggaacgcgtgatttttattttaccaccatcattaagccattgaatgtgatatgggtttggatgcttacgagtgggtaacgacaacttttcgaccagcatggtactcgccaaattgttgcaactgccgctgtcgataatgatgcgaattgaccgctcctgcacaacaccctttgtatggaacagagtgtgtcgctgattcttctcgggcaaagcgacctgtgtactgagaacacgctgcacaacaagactttcgtacctatcagcgtcgcccgggttgacatggacctccgccttagctgcatggtcagtggcaagtagtgcatgttcaatttcttcagaatcactagtggaagagtactcaccatcgtcacgaatgagtaaagtgcgcttgtttgggcagtcccgaatcacatggccaaaccctctacagcgatgacactgaatatcccgtgtacgacctgtgggtggggcagtgctggctggtttggtcgtcttctcgcgtggagtagtggtggacgtggatggcgcagggggaactggtgctgaggtggatgtcgagcttcgtcctgcaaaagggttagaatatggcttcgagcggcgtccctgcacttcacgttcagctttgcaagcatattcaaataaagtagtcatatcataatattccttataatcaagtatatcttggatttcgcggtttaaaccaccacgaaaacgtgccatagcagcgtcgttgtcctccaatatcccacaacgaatcatacctttttgtaactcctggaaatagtcctcaacagattgagaaccttgctgaaaacgctgcattttattaagcaaatcacgagcataatacgaaggcacaaatcgatgtcgcatcacagctttcaactgatcccaagtggttggaatggtagtgggatgttttattttaaactcacgccaccaaattaaagcaaaatcagtaaattcactaatagcagctttaacctgagaatgtgcagcaatatcatggcatgaaaatttttgttcaacctctaactcccaatcaagatatgcagcaggatcatatttgccattaaaaggtggaattttaaatttaatcttagaaaataagtcattagggggatgacgaaccacacggcgtgcacgaccacggcgatctccatcgtcccactcagtgtcaccgccgtagtcctgctccatctttgtggtcaacgcatcaaggcgtgccaggatggtgtcgagtgtggtgcgagtcgccgtttgagcaaggtcaagctggttgaaacgctcggtcgtcgaagtgaccgttgaatcaagccgttcatgcatcgtcctaatgtcatcagcaagtccatcaacttgtccctttacttccagcagctgggcatccaccgtgtcatgtgctcctgccatagttagcgcaaacaccaaaacaccaaaaaaaacgacaaaaacaggggtgtactgctcacaaggcgctcacactagtgctgttatcaaattcttatccgttcttaccaagccacagtggtgaactgcaaccaacaggtggaaccggtgaaagattggatgagcgattgcctggagaaacagaaacctactcgtcgtagaaatatgtggagttctgggtaggctgcactcaagtcaaggattagcacgaccaaacaataatgcaaagttgaattatagtgcaaaacacgaaaatatattgctggccacaagtgcaaaggacggatggaactagcagaatggcagtaccgtaaatattgtactagcgaggccactagtaggaatcacaagtgattttgtttttcttttttgtatgatttttttgatatttttctcagcacaagaagcaacaaaataggagctacacgaagtttcacctaaaacagagttcaaatgtggtctacagaaaatcagaaagttctctgaaaagcgtgcgagaactttgacggatttttttctttattttcctgaatttttttgacaattttgtcgaacccaaacagaccgaaggtgagtttggccggcctcagaatggtgtcaacaagctcctgtaaaaatttcagattttttggacacccgagcgaaaagttatgcccggtttaaggaaggtacctcaagttatgttttcaaacgaccgggatgaaacaaccgtatcctttctccttcgttgtttttttttgtttctgtttttttttgacgtaactgaaggagaaaaacaaggaaacgatgttgactcggtttttttttctgattttttttccgtaaccgaaggagaaaaacaaggaaacggccgttgactcggtttgttttttctgtttttttttacgtaaccgaaggagaaaaacaaggaaacaatgttgactcggtttgtggcgtgatcaaaggggagatggtggcggcgctaggatttgaatggtggaagaacacaatgcaaccagcaacaaggaaacgcgaaagcacacaaattcaacaatgcagattattgaaagaaagtgcgaggctcaaaagggtgctgggataagaactaacctgaatttttatgtggttttgtggactgtaggaaaaaaacgctcgataaactcaccgatcaacctggaaatctgataccaattgatgtagctgaggagcccaatctttcggcgagtagagataattccgatttggcggaagatgacccttgcgatccgactacgacgagcaagcccgaggcgccaatgcaatcgctgaaccaactccctgtggttaccgaccttgctgatgcgagatcggcctgatcacgaagatcgtttcctgtgcgcaatcgaagaacgaacaagaacaagatgcgagcaatctaatctattactcgagggtggagttctgaatacacgaggacagcgcagatttgcgcgtgttcgaaagtagctaaggctaacgtaaaacaaaactcggaaaataaaggaggcgcagctcctgtataaatagagagggggcgcagcccctaggggcggccaaccctaggtcgtccattatgggccgcaattgggctggtcgtctattcttccgggccttcgttctttaacaacatgatgtagttcaattctcttgcacgggcccgagtcactggcccaggtggaaggggtggcgcctggactggggaagatggtgcctgggctggagaaggtgctgctggtgtagatgtgctcgtgttggtgttgatgtcctcatcatcctccccttcttgaactgaagtcgtcctcgacggcaactcctcatcttctcccgcatacggtttcaaatctgcaacattaaaactagtggaaacaccaaactccgcaggcaggtcaaggatataagcattatcattaatcttggttagtaccttaaaaggaccagcagcacgaggcatcaatttagaacggcgcaaagtaggaaaacgatcctttctcaaatgcaaccaaaccatatcaccaggttcaaaagtaactagtttccggcctttactaccagtaatctgatatttagcattagcagcagcaatgttttgttgagtttgttcatggagattaatcatttgttcaacatgtgcaagagcatctatgtgtggggcgtccctagcatcaagcgaaaacaaagcaataggcgccctaggaatgtaaccataaacaatttgaaaagggcacatctttgtagaagaatgtgttgcatgattataagcaaactcaacatgaggtaagcaatcctcccaacgtttcaaatttttgtctaaaacagccctaagcatggtagacaaagttcgattaactacctcagtttgaccatcagtctgagggtgacaagtggtgctaaacagcaatttagttcctaatttattccacagagatctccaaaaatgactcgtgctttgtatgcacccgacacctgttttcggaatgggtgacgtgcgacaacgaaattgtgtgaaaccaccccaaacatgagttttggacctaaagtagtggattgggcatgttcgttacgaaaaacgaagaaatggttccggtggcaaaaactcgtgcttttatgcacgtgacactcgttttcggaatgagtgacgtgcagcaacgaaattgcgcgaaaccacccaaaacatgagttttggacctaaagtagtggattgggcatgttcgttacgaaaaacgaagaaatggttccggtggcaaaaactcgtgcttttatgcacctgacactcgttttcagaatgagtgacgtgcggcaaccaaattgcgcgaaaccacccaaaacatgagttttggacctaaagtagtggattgggcatgttcgttgcgaaaaacgaagaaatggttccggtggcaaaaactcgtgctttgtatgcacccgacacccgtttttggaatgggtgacgtgcggcaacgaaattgcgcgaaaccaccccaaacatgagttttggacctaaagtagtggattgggcatgttcgttacgaaaaacgaagaaatggttccggtggcaaaaatcgtgctttgtatgcaccccgacaaccgttttcagaatgggtgacgtgcggcaacgaaattgcgcgaaaccaccccaaacatgagttttggacctaaagtagtgggttgggcatgttcgttgcgaaaaacgataaatggttctagtggcaaaaactcgtgctttgtatgcacccccgacaaccgtttttagaatgggtgacgtgcggcaacgaaattgcgcgaaaccaccccaaacatcagttttggacctaaagtagtggattgggcatgttcgttgcgaaaaacgaagaaatggttccggtggcaaaaaactcgtgctttgtatgcacccgacacccgttttcggaatgggtgacgtgtgacaacgaaattgtgcgaaaccaccccaaacatgagttttgtacctaaagtagtggattgggcatgttcgttgtgaaaaacgaagaaatggttccggtggcaaaaactcgtgctttgtatgcaccctcgacaaccgttttcggaatgggtgacgtgcggcaacgattttgcgcgaaaccaccccaaacatgagttttggacctaaagtagtggattgggcatgttcgttgcgaaaaacgaagaaatggttccggtggcaaaaactcgtgctttgtatgcacccgacacccgttttcggaatggatgacgtgcgacaccgaaattgcgagaaaccaccccaaacatgagttttggacctaaagtagtggattgggcatgttcgttgcaaaaacgaagaaatggttccggtggcaaaaactcgtgctttgtatgcacccgacacccgttttcggaatgggtgacgtgcgacaacgaaattgcgagaaatcaccccaaacatgagttttggacctaaagtagtggattgggcatgttcgttgcgaaaaacgaagaaatggtttcggtggcaaaaactcgtgctttgtatgcaccccgacaaccgttttcggaatgggtgacgtgcggcaacgaaattgcgcgaaagcagcccaaacatgagttttggacctaaagtagtggattgggcatgttcgttgcgaaaaacgaagaaatggttccggtggcaaaaactcgtgctttgtatgcacccccgacaaccgttttcagaatgggtgacgtgcgggaacgaaattgcgcgaaaccaccccaaacatgagttttggacctaaagtagtggattgggcatgttcgttgcgaaaaacgaaaaaatagttctggtggcaaaaactcgtgcttttatgcacccgacacccgttttcggaatgggtgacgtgcggcaacgaaattgcgcgaaaccaccccaaacatgagtgttgtgcctaaagtagtagattgggcatgttcgttgcgaaaaacgaagaaatggttccggtggcaaaaactcgtgctttgtatgcaccccgacaaccgttttcagaatgggtgacgtgcggcaacgaaattgcgcgaaaccaccccaaacatgagttttggacctaaagtagtggattgagcatgttcgttgcgaaaaacgaagaaatggttccggtggcaaaaactcgtgctttgtatgcacccgacacccgttttcggaatgggttacgtgcgacaacgaaattgcgagaaaccacctcaaacatgtgttttggacctaaagtagtggattgggcatgttcgttgcgaaaaacgaagaaatggttccggtggcaaaaactcgtgctttgtatgcaccccctacacccgttttcggaatgggtgacgtgtgacaacgaaatgcgcgaaaccaccccaaacatgagttttggacctaaagtagtggattgggcatgttcgttgtgaaaaaacgaagaaatggttccagtggcaaaaactcgtgctttgtatgcacccccgacaaccgttttcggaatgggtgacgtgcggcaacgaaattgcgcgaaaccaccccaaacatgagttttggacctaaagtagtggattacgcatgttcgttgcgaaaaacgaagaaatggttccggtggaaaaaactcgtgctttgtatgcacccgacacccgttttcggaatgggtgacgtgcgacaacgaaattgcgcgaaaccagcccaaacatgagttttggacctaaagtagtggattgggcatgttcgttgcgaaaaacgaagaaatggttccggtggcaaaaactcgtgctttgtatgcaccccacacccgttttcggaatgtgatgaagacatccacactactgatgcatctataccaatacaagtaccaatttctggtcccattactcgcgctcgtgctcgtcaactcaaccatcaggtgattacactcttgagttcatgtccatcatatttagaccatggagacccgtgcactcttgttttgcttaggaatcagggagaagaccgaatgggaaaaggatttgaacatgctggattcggactgcagaagaacaccaacttgtgacggtcaccacggtcagatgcgggctcggattggaatgttcaagcacaacatggaaagcttatcaagtctacttcatatggatccggaattatagtcatatctgttctgaggccgccgtaatcattgttttcttaccgagacatttcctgccttttatgcccatggtgctgcgtcaccctattttggcccaatgggtcgtgtatcaagttaggtccattagggacgcatcctagggttgcagcacgaccccaatacccttgtggtcatcctcccatatttataaaccccctagccgccaccaagaacagcgggttttgtttagatcaagtttagctctcgctacttgcttgcaagcgcgcgtgctagttcagccgcccgtcttcttgtcttcggaaccccaccatattggagtttgatttttaaacctacatttagatctggtaattcagtacttgttctacttgttcttgctagttcttcgattgcttgcaggacgagtgccctagtggccagggtgtcacgctccacaagatcgtgacagccataggaggtggtgtatcggttgctaaggcgcagcgtctttggaaggctgtagtcgggccgtgaacgtcgtctcctcccccaatcgagttattccacaccctctcatcgaaagatcgggcaatcacccaacgggtgcacatcagtttatatctcctagacaaagcgtcagcaatgatattctcttttcctttcttgtgcttaataacataaggaaacgattcgataaattcaacccacttagcatgtctacggttcagttttccttgactacgaatatgtttggattagagatgattaaagaccaatatgttcatgatgctgattttaaagatgtgttgctgcattgtaaagatgggaaatgatggaacaaatatatcgttagtgatgggtttgtgtttagagctaacaagctatgcattacagctagctccgttcgtttgttgttgttacaggaagcacatggaggtggcttaatgggacattttggagcaaagaaaacggaggacatacttgctggtcatttcttttggcccaagatgagaagagatgtggtgagattggttgctcgttgcacgacatgtcaaaaggcgaagtcacggttaaatccacacggtttgtatttgcctctacccgttcctagtgctccttgggaagatatttctatggattttgtgctgggattgcctaggactaggaagggacgtgatagtgtgtttgtggttgttgatagattttctaagatggcacatttcataccatgtcataaaactgacgatgctactcatattgctgatttgttctttcgtgaaattgttcgcttgcatggtgtgcccaacacaatcgtttctgatcgtgatgctaaatttcttagtcatttttggaggactttgtgggcaaaattggggactaagcttttattttctactacatgtcatcctcaaactgatggtcaaactgaagttgtgaatagaactttgtctactatgttaagggcagttctaaagaagaatattaagatgtgggaggactgtttgcctcatgttgaatttgcttataatcgatcgttgcattctactacaaagatgtgcccatttcagattgtatatggtttgttgcctcgtgctcctattgatttaatgcctttgccatcttctgaaaaactaaattttgatgctactaggcgtgctgaattgatgttaaaactgcatgaaactactaaagaaaacatagagcgtatgaatgctagatataagtttgctagtgataaaggtagaaaggaaataaattttgaacctggagatttagtttggttgcatttgagaaaggaaaggtttcctgaattacgaaaatctaaattgttgcctcgagccgatggaccgtttaaagtgctagagaaaattaacgacaatgcatataggctagatctgcctgcagactttggggttagccccacatttaacattgcagatttaaagccctacttgggagaggaagttgagcttgagtcgaggacgactcaaatgcaagaaggggagaatgatgaagacatccacactattgatgcatctataccaatacaagtaccaatttctggtcccattactcgcgctcgtgctcgtcaactcaaccatcaggtgattacactcttgagttcatgtccatcatatttagaccatggagacccgtgcactcttgttttgcttaggaatcagggagaagaccgaatgggaaaaggatttgaacatgctggattcggactgcagaagaacaccaacttgtgacggtcaccacggtcagatgcgggctcggattggaatgttcaagcacaacatggaaagcttatcaagtctactttcatatggatccggaattatagtcatatctgttctgaggccgccgtaatcattgttttcttaccgagacatttcctgccttttctgcccatggtgctgcgtcaccctattttggcccaatgggtcgtgtatcaagttaggtccattagggacgcatcctagggttgcagcacgaccccaatacccttgtggtcgtcctcccatatttataaaccccctagctgccaccaagaacaacgggttttgtttagatcaagtttagctctcgctacttgcttgcaagcgcgcgtgctagttcagccgcccgtcttcttgtcttcggaaccccaccatattggagtttgatttttaaacctacatttagatctggtaattcagtacttgttctacttgttcttgctagttcttcgattgcttgcaggacgagtgccctagtggccagggtgtcacgctccacaagatcgtgacagccataggaggtggtgtatcggttgctaaggcgcagcgtctttggaaggctgtagtcgggccgtgaacgtcgtctcctcccccaatcgagttattccacaccctctcatcgaaagatcgggcaatcacccaacgggtgcacatcagaatgggtgacgtgtgccaacgaaattgcgcgaaaccaccccaaacatgagttttgtacctaaagtagtggattgggcatgttcgttgtgaaaaacgaagaaatggttccggtggcaaaaactcgtgctttgtatgcaccctcgacaaccgttttcggaatgggtgacgtgcggcaacgattttgcgcgaaaccaccccaaacatgagttttggacctaaagtagtggattgggcatgttcgttgcgaaaaacgaagatatggttccggtggcaaaaactcgtgctttgtatgcacccgacacccgttttcggaatgggtgacgtgcgacaccgaaattgcgagaaaccaccccaaacatgagttttggacctaaagtagtggattgggcatgttcgttgcaaaaacgaagaaatggttccggtgacaaaaactcgtgctttgtatgcacccgacacccgttttcggaatgggtgacgtgcgacaacgaaattgcgagaaatcaccccaaacatgagttttggacctaaagtagtggattgggcatgttcgttgcgaaaaacgaagaaatggttccggtggcaaaaactcgtgctttgtatgcacccccgacaaccgttttcggaatgggtgacgtgcggcaacgaaattgcgcgaaaccaccccaaacatgagttttggacctaaagtagtggattgggcatgttcgttgcgaaaaacgaaaaaatggttccggtggcaaaaactcgtgctttgtatgcacccgacacccgttttcggaatgggtgacgtgcgacaacgaaattgcgcgaaaccaccccaaacatgagttttggacctaaagtagtggattgggcatgttcgttgcgaaaaacgaagaaatggttccggtggcaaaaactcgtgctttgtatgcacccccgacaaccgttttcggaatgggtgacgtgcggcaacgaaattgcgcgaaaccaccccaaacatgagttttggacctaaagtagtggattgggcatgttcgttgcgaaaaacgaagaaatggttccggtggcaaaaactcgtgctttgtatgcacccgacacccgttttcggaatgggtgacgtgcgacaacgaaattgcgcgaaaccaccccaaacatgagttttggatctaaagtagtggattgggcatgttcgttgcgaaaaacgaagaaatggttccggtggcaaaaactcgtgctttgtatgaacccgacacccgttttcggaatgagtgacgtgcgacaacgaaattgtgcgaaaccaccccaaacatgagttttgtacctaaagtagtggattgggcatgctcgttacgaaaaacaaagaaatggttccggtggcaaaaactcgtgcttttatgcaccccgatacccgttttcagaatgggtgacgtgcgacaacgaaattgcgcgaaaccacctcaaacatgagttttggatctaaagtagtggattgggcatgttctttgcgaaaaacgaagaaatggttccggtggcaaaaactcgtgctttgtatgcacccgacacccgttttcggaatgggtgacgtgcggcaacgaaattgcgcgaaaccaccacaaacatgagttttggacctaaagtagtggattgggcatgttcgttacgaaaaaacgaagaaatggttccggtggcaaaaactcgtgcttttatgcacccgacactcgttttcggaatgagtgacgtgcggcaacgaaattgcgcgaaccaccccaaacatgagttttgtacctaaagcagtggattgggcttgttcgttgcgaaaaacgaagaaatggttccggtggcaaaaatcgtgctttgtatgcaccccgacaaccgttttccgaatgggtgacgtgcggcaacgaaattgcgcgaaaccaccccaaacatgagttttggacctaaagtagtgggttgggcatgtttgttgcgaaaaacgaagaaatggttccggtggcaaaaacttgtgctttgtatgcacccccgacaaccgtttttagaatgggtgacgtgcggcaacgaaattgcgtgaaaccaccccaaacatgagttttagacctaaagtagtggtttgggcatgttcgttacgaaaaacgaagaaatgattccggtggcaaaaaacttgtgctttgtatgcacccgacacccgttttcggaatgggtgacttgcgacaacgaaattgcgagaaatcaccccaaacatgagttttggacctaaagtagtggattgggcatgttcgttgcgaaaaacgaagaaactgttccggtggcaaaaactcgtgctttgtatgcacccccacacccgtttttagaatgggtgacgtgcggcaacgaaattgcgcgaaaccacccgaaacatgagttttggacctaaagtagtggattgggcatgttcgttgcgaaaaacaaagaaatgttttcggtggcaaaaactcgtgctttgtatgcactgatgaggacatcactatgagtacgactacaccagcagcacctccacatcaagcgccacttccttcattagctgggccaatcactcgggcccgtgccagagatcttaacttcatcatgctactgaagaatgagggcccagaagaatagacgaccagcccaactgcggcccatagtggacgacctagggttggccgccctaggggttgcgcccctctatttatccaggagctgcgcctcctttattttcgagttttgttttacgttagccttagctactctcgaacacgcgcaaatctgcgctgtcttcgtgtattcagaactccaccctcgagtaatagattagattgctcgcatctttttcttgttcgttcttcgattgcgcacaggaaacgatcttcgtgatcaggccgatctcgcatcagcaaggtcggtaaccacagggagttggttcagcgattgcattggcgcctcgggcttgctcgtcgtagtcggatcgcaagggtcatcttccgccaaatcggaattatctctactcgccgaaagatcgggcacctcagctacatcaattggtatcagatttccaggttgatcggtgagtttatcgagcgttttttttcctacagtccacaaaaccacataaaaattcaggttagatcttatcccagcacccttttgagcctcgcactttctttcaataatctgcattgttgaatttgtgtgctttcgcatcatttgttgctggttgcattgtgttcttccaccattcaaaccctagcgccgccaccatctcccgtttgatcacgccacaaaccgagtcaacatcgtttccttgtttttctccttcagttacgtaaaaaaaaacagaaaaaacaaaccgagtcaacggtcgtttccttgtttttctccttcggttaaaaaaacagaaaaaaaaacaaaccgagtcaacagccgcctccttgtttttctccttcggttactaaaaaaacagaaacaaaaaaaaggaaaacgaaggagaaaggatacggttgtttcatcccggtcgtttttaaaacatcacttgaggtaccttccgtaaaacgggcataacttttcgctcgggtgtccaaaaattctgaaatttttacaggaccttgttgacaccattctgaggccggccaaactcacctacggtctttttggggttcaaaaaaattgtcaaaaaaattcaggaaaataaagaaaaaaattcgtcaaagttctcgcacgctttttagagaacttcctgattttctatagaccacatctgatttctgttttaggtgaaacttcgtgtagctcctattttgttgcttcttgtgctgagaaaaatatcaataaaatcatacaaaaaagaaaaacaaaatcacttgtgattcctactagttcctttttggcatcactagtacaatatttacggtactgccattctgctagttccatccgtcctttacacttgtggccagcaatatagtttcgtgttttgcactataattcaactttgcattattgtttgatcgtgctaatccttgacttgagtgcagcctacccaaaactccacatatttctatgacgagaaggtttctgtttctccaggcaatcactcatccaatctttcaccggttccaccttttggttgcagttcaccactgtggcttggtaagaacggataagaacttgataatagcactagtgtgagcgccttgtgagcagtacacccctgtttttgtcgttggttttttctccttttggtgttttggtgtttgcactaactatggcaggagcacacgacatggtggatgcctagttgcaggaagtacggggacaagttgatggacttgctgctgacattaggacgatgcatgaacggcttgattcaacgatcacttcgacgaccgagcgtttcaaccaacttgaccttgctcaaacggcgactcgcaccacactcgacaccatcctggcacgccttgatgcattgaccacacagatggagcaggaatacggcggtgacactgagctggacgatggagatcgccgtggtcgtgcacgtcgtgtggttcgtcatcaccctaatgacttattttctaagattaaattaaaaatttcatcttttaatggtaaatatgatcctgctgcatatcttgattgggaattggaggtagaacagaaatttttatgccatgatattcctgctaatagccaagtgaaggctgccattagtgaatttactgattttgctttaatttggtggcgtgagtataaacaaaaacttcccattaacagtgtcattacttggacccaattaaaaactgccatgcgccacagatttgttccttcctattatgctcgtgatttgcttaacaaaatgcagcgttttcaacaaggttcacaatctgttgaggaatattaccaggagttacaaaagggtatgcttcgttgtggtttggttgagtcagatgacgctgctatggcgcgttttcgtggtggtttgaacagggaaattcaggatatacttgattataaggattattttgatataaccatattgtttgaatatgcttgcaaagctgaacgtgaagtgcagggacgactatcaaagacatatactaactcttttgcaggccggggtccaacacacagctcaactccttctagccctgcacctttctacgcctagcactacatcgcg

SEQ ID NO: 764 - DNA, 790 bp, Zea mays
  source (0)...(0): Zea mays BAC clone full insert sequence contig bacm.pk119.a23.fis1
  misc_feature (1)...(790): n = A,T,C or G
gtacgttannnnnnnnnnnnnnnnnnnnnnnnnnnnnnnnnnnnnnnnnnnnnnnnnnnnnnnnnnnnnnnnnncatcacgtcgtgtggttcgtcatcccgctaatgacttattttctaagattaaatttaaaattccatcttttaatggtaaatatgatcctgctgcatatcttgattgggaattagaggtagaacagaaattttcatgccatgatattcctgctaatagccaagtgaaggctgccattagtgaatttactgattttgctttaatttggtggcgtgagtataaacaaaaacttcccattaacagtgtcattacttggacccaattaaaaactgccatgcgccacagatttgttccttcctattatgcttgtgatttgcttaacaaaatgcagcgttttcaacaaggttacagtctgttgaggaatattaccaggagttacaaaagggtatgcttcgttgtggtttggttgagtcggatgacgctgctatggcgcgttttcgtggtggtttaaacagggaaattcaggatatacttgattataaggattattttgatataaccacattgtttgaatatgcttgcaaagctgaacgtgaagtgcagggacgacgatcaaagacatatactaactctcttgcaggccggggtccaacacacagctcaactccttccagccctgcacctcctacgcctagcactacatcgcgcacagggacgaccaagccagtggcgccccctgccaaaggcgccgcttcttccacaggacgtacacgggata

SEQ ID NO: 765 - DNA, 688 bp, Zea mays
  source (0)...(0): Zea mays BAC clone full insert sequence contig bacm.pk119.a23.fis2
  misc_feature (1)...(688): n = A,T,C or G
ctccaaagtttgtgggggcttcctggcgaagtactgagctgacggtcctggccgaagccccttgatcatggcctcaatgacaatttcattgggcaccgttggtgcctgtgctctcaaacgcaagaaccttcggacatacgcctgaaggtattcttcgtgatcctgggtgcactggaacagagcctgagcagtaaccggcttcgtctgaaacccttggaagctagttaacaagaggtccttcagcttctgccatgaagtgatcgttcctggtcgaagggaggaataccaggtttgagcaacacttctgacagccataacaaaagatttggccatgaccgcagcattgccaccataggaagatactgttgcctcgtagctcatcaaaaactgcttcgggtctgagtggccatcgaatacgggaagctgaggaggcttgtaagacggaggccaaggtgtagcctgcagctcagcggacagaggagaagcatcgtcaaagacaaaattcccatgatggaaattgtcataccagtcatctccgttgggaaaatcctcctgatgaaggtcttggtgctgaggccttcggtgttgctcatcctgagcaaggtgacgaacttcttcannnncttcgtctatctgcctctgtagttcagctagcctgnnnatcttttctttcnncntctgcacttnn

SEQ ID NO: 766 - DNA, 798 bp, Zea mays
  source (0)...(0): Zea mays BAC clone full insert sequence contig bacm.pk119.a23.fis3
  misc_feature (1)...(798): n = A,T,C or G
ctttcggatcgctcnnnnnnnnnnnnnnnnnnnnnnnnnnnnnnnnnnnnnnnnnnnnnnnnnnnnnnnnnnattgctagatcaactataccttgtccttctcatgttatattttacattgctggcaagtacaacaacataggacaatttcttgtgcatagaatttttatttcatctagatatgttgtttcttcactttgtgcaaataagatattggtatgttctcaagaagaaaagaatctcttgtttccatgtactttagtagaagtttcaagtttatatttgaaagacattgataaaagcttagtcatcaacatcaatcatgatgcaaaaccgaggacggtttgctgtcaagaaggggagaatgatgagaacataacccgcacagatatggccatgttaatggctcctgctacaaagacattgaggaacaaagaagttgattggggtccaagtaatgatatttccaacatttccaaccaagcaagcacatcatcaaatttaaagatatacttgggtgaggagtgcacactagagtcgaggacgactctattacaagaaggggaggatgatgaggacatcactgccatcaatacaaccacaccagcgacccccttcaccatttaatcatggaccagtgaaacgagtccgtgcacgtaaatttaattatcaggtgaactcgttccttgttgttgaagctaatcattccttaaatgaggtattaataccttgtgattactttattatgctaaggtgtttgggaggtaaaccatctagaatttgagaaggcaacaaggc

SEQ ID NO: 767 - DNA, 892 bp, Zea mays
  source (0)...(0): Zea mays BAC clone full insert sequence contig bacm.pk119.a23.fis4
  misc_feature (1)...(892): n = A,T,C or G
nnnnnnnnnnnnnnnnnnnnnnnnnnnnnnnnnnnnnnnnnnnnnnnnnnnnnnnnnnnnnnnnnnnnnnnnnnnnnnnnnnnnnnnnnnnnnnnnnnnnnncccgacgcgacgctgctggttcgctggttggtgtccgttagactcgtcgacggcgtttaacaggctggcattatctactcgaaacaagaaaaatgtttccttagtttttttaatttcttaaagggtatttgtttaatttttagtcactttattttattctattttatatctaaattattaaataaaaaaactaaaatagagttttagttttcttaatttagaggctaaaatagaataaaatagatgtactaaaaaaattagtctataaaaaccattaaccctaaaccctaaatggatgtactaataaaatggatgaagtattatataggtgaagctatttgcaaaaaaaaaggagaacacatgcacactaaaaagataaaactgtagagtcctgttgtcaaaatactcaattgtcctttagaccatgtctaactgttcatttatatgattctctaaaacactgatattattgtagtactatagattatattattcgtagagtaaagtttaaatatatgtataaagatagataaactgcacttcaaacaagtgtgacaaaaaaaatatgtggtaattttttataacttagacatgcaatgctcattatctctagagaggggcacgaccgggtcacgctgcactgcaggcatgcaagctgatctgnnnnnnnnnnnnnnnnnnnnnnnnnnnnnnnnnnnnnnnnnnnnnnnnnnnnnnnnnnnnnnnnnnnnnnnnnnnnnnnnnnnnnnnnnnnnnnnnnnnnnnnnnnnnnnnnnnnnnnnnnnnnnnn

SEQ ID NO: 768 - DNA, 856 bp, Zea mays
  source (0)...(0): Zea mays BAC clone full insert sequence contig bacm.pk119.a23.fis5
  misc_feature (1)...(856): n = A,T,C or G
ggaatagcgcattannnnnnnnnnnnnnnnnnnnnnnnnnnnnnnnnnnnnnnnnnnnnnnnnnnnnnnnnnnnnnnnnnnnnnnnnnnnnnnnnnnnnnnggacctaaagtagtggattgggcatttttgttgcgaaaaaaaaagaaatggttccggtggcaaaaacttgtgctttgtatgcaccccgacacccgttttcggaatgggtgacgtgcgacaacgaaattgtgcgaaaccaccccaaacatgagttttggacctaaagtagtggattgggcatgttcgttgcgaaaaacgaagaaatggttccgatggcaaaaactcgtgctttgtatgcacccgacacccgttttcggaatgggtgacgtgcgacaacgaaattgcgcgaaaccaccccaaacatgagttttggacctaaagtagtggattgggcatgttcgttgcgaaaaccaaaaaatggttccggtggcaaaaactcctgctttgtatgccccccacaccccttttccgaaagggtgacgtgcggcaacgaaattgcgtgaaaccacccccaacatgagttttagatctaaagtaatggatttggcatgttcgttgcaaaaaacaaaaaaatggttccggtggcgaaaactcctgctctgtatacaccccacacccgttttctgaatgggtgacgtgtgacaacgaaattgtgcgaaaccacccccaacatgaattttggatctaaaatagtggattgggcatgttcgttgcgaaaaaagaagaaaaggttcctgtggcgaaactcgtgctttgtatgcacccccacacccgatctcagaatgggtgacgtgcggcagcgaaattgcgtgtaa

SEQ ID NO: 769 - DNA, 882 bp, Zea mays
  source (0)...(0): Zea mays BAC clone full insert sequence contig bacm.pk119.a23.fis6
  misc_feature (1)...(882): n = A,T,C or G
ccaaaagcggcattnnnnnnnnnnnnnnnnnnnnnnnnnnnnnnnnnnnnnnnnnnnnnnnnnnnnnnnnnnnnnnnnnnnnnnnnnnnnnnnnnnnnnnnnncgttgcgaaaaacgaagaaatggttccggtggcaaaaactcgtgcttttatgcaccccgatacccgttttcagaatgggtgacgtgcgacaacgaaattgcgtgaaaccaccccaaacatgagttttagatctaaagtagtggattgggcatgttcgttgcgaaaaacaaagaaatggttccggtggcaaaaactcgtgctttgtatgcacccgacacctgttttcggaatgggtgacgtgtgacaacgaaattgtgcgaaaccaccccaaacatgagttttggacctaaagtagtagattgagcatgttcgttgcgaaaaacgaagaaatggttccggtggcaaaaactcgtgcttttatgcatacccgttttcagaatgggtgacgtgcgacaacgaaattgcgcgaaaccacctcaaacatgagttttggacctaaagtagtggattgggcatgttcgttgcgaaaaacgaagaaatggttccggtggcaaaaactcgtgctttgtatgcacccccacacccgttttcataatgggtgacgtgcggcaacgaaattgtgcgaaaccacccaaacatgagttttggacctaaactagtggattgggcatgatcgttgagaaaaacaaagaaatggttccggtggcaaaaactcatggtttgtatgcacccgacacccgttttcggaatgggtgacgtgcgacaacgaaattgtgcgaaaccacccccacacatgagttttggatctaaatagtggattggggcatgtttcgttgcga

SEQ ID NO: 770 - DNA, 829 bp, Zea mays
  source (0)...(0): Zea mays BAC clone full insert sequence contig bacm.pk119.a23.fis7
  misc_feature (1)...(829): n = A,T,C or G
cccggtgcgcnnnnnnnnnnnnnnnnnnnnnnnnnnnnnnnnnnnnnnnnnnnnnnnnnnnnnnnnnnnnnnnnnnnnnnnnnnnnnnnnnnnnnnnnnnnnctgtataccacatctgatatctgttttaggtgaacttcgtgtagctcctatcttgttgcttcttgtgctaagaaaaatatcaaaaaaatcatacaacaaagaaaaaacaaaatcacctgtgatttctactagtgccttttttggcatcactagtacaatatttacgttactgccattctgctagttccatccatcctttgcacctgtggccagcaatatagtttcgtgttttgcactataattcaactttgcattattgtttgatcgtgctaatccttgacttgagtgcagcctacccacaactccacatatttctacgacgagcaggtttctgtttctccacgcaatcgctcatccaatctttcaccggttccacctgttgattgcagttcaccactgtggcttggtaagaacggataagaacttgataacagcactagtgtgagcgccttgtgagcagtacacccctgtttttgtcgttggttttttctccttttggtgttttggtgtttgcactaactatggcaggagcacccaacatggtggatgcccagttgcaggaagtaaggggacaagttgatggacttgctgctgacattaggacgatgcatgaacggcttgattcaacgatcacttcgacgaccgagcgtttcaaccaacttgaccttgctcaaacggcgactcgcaccacactcgacaccatcctggcacgccttgatgccttgac

SEQ ID NO: 771 - DNA, 840 bp, Zea mays
  source (0)...(0): Zea mays BAC clone full insert sequence contig bacm.pk119.a23.fis8
  misc_feature (1)...(840): n = A,T,C or G
nnnnnnnnnnnnnnnnnnnnnnnnnnnnnnnnnnnnnnnnnnnnnnnnnnnnnnnnnnnnnnnnnnnnnnnnnnnnnnnatttctaggttgatcggtgagtttatcgagcgtttttttttcctacagtccacaaaaccacataaaaattcaggttagatcttatcccagcacccttttgagcctcgcactttctttcaataatctgcattgttgaatttgtgtgctttcgcgtcatttgttgctggttgcattgtgttcttccaccattcaaaccctagcgccgccaccatctctcgtttgatcacaccacaaaccgagtcaacattgtttccttgtttttctccttcggttacgtcaaaaaaaaacagaaaaaacaaaccgagtcaacggctgttttccttgattttctccttcggttacgaaaaaaaaacagaaaaaaaacagaaaaaaaaacaaaccgagtcaacatcgtttccttgtttttctccttcggttacgtaaaaaaaaacagaaacaaaaaacaacgaaggagaaaggatacggttgtttcattccggtcgtttgaaaacataatttgaggtaccttccttaaaccgggcataacttttcgctcgggtgtccaaaaaatctgaaatttttacaggagctagttgacaccattctgaaatttttacggtctgtttggggttcgacaaaattgtcaaaaaaattcaggaaaataaagaaaaaaatccgtcaaagttctcgcacgcttttcagagaacttcctgattttctgtagctcctatctttttgcttcttgtgctgagaaaaatatcaaaaaaatcatacaaaaaaga

SEQ ID NO: 772 - DNA, 834 bp, Zea mays
  source (0)...(0): Zea mays BAC clone full insert sequence contig bacm.pk119.a23.fis9
  misc_feature (1)...(834): n = A,T,C or G
ccgtgcgcagtnnnnnnnnnnnnnnnnnnnnnnnnnnnnnnnnnnnnnnnnnnnnnnnnnnnnnnnnnnnnnnnnnnnnnnnnnnnnnnnnnnnnnnnnnggtacgcttgtttgggcagtcccgaatcatgtgcccaaaccctctgcaacgatggcactgaatatcccgtgtacgtcctgtggaagaagcggcgcctttggcagggggcgccactggcttggccggccctgtgcgcgatgtagtgctaggcgtaggaggtgcagggctggaaggagttgagctgtgtgttggaccccggcctgcaaaagagttagtatatgtctttgatcgtcgtccctgcacttcacgttcagctttgcaagcatattcaaacaatgtggttatatcaaaataatccttataatcaagtatatcctgaatttccctgttcaaaccaccacgaaaacgcgccatagcagcgtcatctgactcaaccaaaccacaacgaagcatacccttttgcaactcctggtaatattcctcaacagattgtgaaccttgttgaaaacgctgcattttgttaagcaaatcacgagcataataggaaggaacaaatctgtggcgcatggcagtttttaattgggtccaagtaatgacactgttaatgggaagtttttgtttatactcacgccaccaaattaaagcaaaatcagtaaattcactaatggcagccttcacttggctattagcaggaatatcatggcatgaaaatttctgttctacctctaattcccaatcaagatatgcagcagggatcatatttaccattaaaagatggaattttaaatttaatc

SEQ ID NO: 773 - DNA, 828 bp, Zea mays
  source (0)...(0): Zea mays BAC clone full insert sequence contig bacm.pk119.a23.fis10
  misc_feature (1)...(828): n = A,T,C or G
gcggtacgcattnnnnnnnnnnnnnnnnnnnnnnnnnnnnnnnnnnnnnnnnnnnnnnnnnnnnnnnnnnnnnnnnnnnnnnnnnnnnnnnnnnnnnnnnnccttggccccgaccaactggtcaaagagaacatcaatacgaggcaaaggatacttgttcttgatagttaccgcattaagagggcggtaatctatacacagcctcaagctttcatccttcttcttcacaaatagtgctggacatccccaaggcgaagtgcttgggcgaatgaaacccttatccagcaattcttgcaactgcttcttcaactctgccaactcagcgggtggcattcggtagggcctcttggaaattggggtcgttcccggttgcaactcgatggcgaattcaacatcccggtctggtggattcctggcaattcatcagggaagacatctgcatactcacagaccactgggatcttcttcaggggtaactccgtcatagagaaagcacatgactgagaagaaccctaactaggcagaatcaaagtgaaattcccgcagaaaggagaattaacttccacggtacgactggctacatcaagcacaacttggtgcaaggtcatccaatttgcccctagaataatgtccacattttccaatcccaacacaagaagagtggttttgacaatgtggcttcccagttgaataggcacactttggtttaattgattagttgcaattttacccctaggtgtgactatcatgaatgacccttttgagtgagagaatggcagtttgcatctagcactgaacttttggctaatgaaactatgagatgcacca

SEQ ID NO: 774 - DNA, 1250 bp, Zea mays
  misc_feature (0)...(0): Zea mays BAC clone full insert sequence contig bacm.pk119.a23.fis11
ctactttaggtccaaaactcatgtttggggtggtttctcgcaatttcgttatcgcacgtcacacatttcgaaatcgggtgtcgggtgcatacaaagcacgagtttttgccaccgaaaccatttcttcgtttttcgcaacgaacaggcccaatccactactttaggtccaaaactcatgtttggggtggtttcctgcaatttcgttgccccacatcacccattccgaaaacgggtgtcgggtgcatacaaagcacgactttttgccaccggaaccatttcttcgtttttcgcaacgaatatgtccaatccactactttaggtccaaaactcatgtttgaggtggtttcgcgcaatttcgttgtcgcacgtcacccattccgaaaactagtgtcggggtgcatacaaagcacgagtttttgccaccggaaccatttcttcgtttttcgcaacgaacatgcccaatccactactttaggtccaaaactcatgattagggtggtttcgcgcaatttcgttgccgcacgtcacccattctaaaaacggttgtcagggtgcatacaaagcacgcgtttttgccaccgaaaccatttcttcgtttttcgcaatgaacatgcccactccactactttaggtccaaaactcatgtttgaggtagttttgcgcaatttcgttgccgcacgtcacccattctgaaaacggttgtcggggtgcatacaaagcacgagtttttgccaccggaaccatttcttcgtttttggcaacgaacatgcccaatccactactttaggtccaaaactcaagtttggggtggtttcccgcaatttcgttgtcccacgtcacccattccgaaaacgggtgtggggtgcatacaaagcacgaatttttgccaccggaaccatttcttcctttttcccaatgaacatgcccaatccactaatttaggtccaaaactcaagtttggggtggtttcccgcaatttcgttatcgcacgtcacacatttcgaaaacgggtggtcggtgcatacaaagcacgaagttttgctaccggaaacgtttcttcgttttgccacgaaaagcccaatccaactactttaggtccaaaactcaggttgggggtggtttctcgcacttcgttgtcgcacgtcacacattcgaaacagtgtcaaggtgcatacaagcacgagttctggcacaggaacaattcatcgtttggcacgacatgccatcactacttaaggtcaaactcagtt

SEQ ID NO: 775 - DNA, 1127 bp, Zea mays
  misc_feature (0)...(0): Zea mays BAC clone full insert sequence contig bacm.pk119.a23.fis12
caacgaaattgcgagaaaccaccccaaatatgagttttggacctaaagtagtggattgggcatgttcgttgcgaaaaacgaagaaatggttcatgtggcaaaaactcgtgctttgtatgcaccccgacacccgttttcgaaatgggtgacgtgcgacaacgaaattgcgagaaaccaccccaaacatgagttttggacctaaagtagtggattgggcatgttcgttgcgaaaaacgaagaaatggttccggtggcaaaaactcgtgctttatatgcacccccgacaaccgttttcaaaatgggtgacgtgcggcaaaaaaattgcgcgaaaccaccccaaacatgacttttggacctaaagtagtggattgggcatgttcgttgcgaaaaacgaaaaaatggttccggtggcaaaaactcgtgctttgtatgcaccccgacacccgttttcggaatgggtgacgtgcgacaacgaaattgcgcgaaaccaccccaaacatgatttttggacctaaagtagtggattgggcttgttcgttacgaaaaacgaagaaatagttccggtggcaaaaactcgtgttttgtatgcacccgacacccgttttcggaatgggtgacgtgctacaacgaaattgcgcgaaaccaccccaaacatgagttttggacctaaagtagtggattgggcatgttcgttgcgaaaaacgaagaaatggttccggtggcaaaaactcgtgctttgtatgcaccccgacacccgttttcagaatgggtgacgtgcggcaacgaaattgcgcgaaaccaccccaaacatgagttttggacctaaagtagtggattgggcatgttcgttgcgaaaaacgaaaaaatggttccggtggtaaaaactcgtgctttgtatccacccgtcacccgttttctgaatgagtgacgtggggtgtgacaactaaattgtgtcaccccaccccaaactttaggtttggacctaaagaagtggagtgggtatgttcgtagcaaaaaaaaaagaattggttccggagaaaaaaactcgtgtttttatgcaccccgctactcgttttctgaaggggtgacgtgcgacaacgaaattgcgccacaccaccccaaacatt

SEQ ID NO: 776 - DNA, 790 bp, Zea mays
  misc_feature (0)...(0): Zea mays BAC clone full insert sequence contig bacm.pk119.a23.fis13
tagtggattgggcatgttcgttgcaaaaaacaaagaaatggttccggtggcaaaaactcgtgctttgtatacacccgacacctgttttcggaatgggtgacgtgtgacaacgaaattgtgcgaaaccaccccaaacatgagttttggatctaaagtagtggattgggcatgttcgttgcgaaaaatgaagaaatggttccggtggcaaaaactcgtgctttgtatgcaccccgacccccgatttcagaatgggtgacgtgcgacaacgaaattgcgtgaaaccaccccaaacatgagtttttgacctaaagtagtggattgggcatgttcgttgcgacaaacaaagaaattgttctggtggcaaaaactcgtgctttgtatgcacccgacacctgttttcggaatgggtgacgtgcgaaaacgaaattgcgcgaaaccaccccaaaacatgatttttggacctaaagtagtggattggacattttcgttgtgaaaaacgaagaaatggttccggtggcaaaaactcgtgcttttatgcacctcgataccctttttcagaatgggtgacgggggacaacgaaattgcgcgaaccccccccaaacttgattttgggaccaaagttgggggatggggcattttgttggcaaaaacgaagaaatggttccggtggcaaaaactcgtgctttgtatgcacccgacacccgttttcggaacgggcgacgtgtgacaacgaaattgcgcgaaaccaccccaaacatgagttttggatctaaagtagtggattgggca

SEQ ID NO: 777 - DNA, 667 bp, Zea mays
  misc_feature (0)...(0): Zea mays BAC clone full insert sequence contig bacm.pk119.a23.fis14
tacgaacatgcccaatccactaatttaggtccaaaactcatgtttggggtggtttcgcgcaatttcgttgtcgcacgtcacccattccgaaaacgggtgtcgggtgcatagaaagcacgagtttttgccaccggaaccgtttcattgtttttcgcaacgaatatacccaatccactactttaggtccaaaactcatgtttgaggtggtttcgcgcaatttcgttgtcgcacgtcacccattccgaaaactagtgtcggggtgcatacaaagcacgagtttttgccaccggaaccatttcttcgtttttcgcaacgaacatgcccaatccactactttaggtccaaaactcatgtttggggtggtttcgcgcaatttcgttgtcgcacgtcacccattccgaaaacaggtgtcgggtgcatacaaagcacgagtttttgccaccggaaccatttcttcgtttttcacaacaaacatgcccaatccactaatctaggtccaaaactcatgtttggggtggttttgcgcaatttcgttgccgcacgtcacccattccgaaaacgggtgtcgggtgcatacaaagcacgagtttttgccaccagaaccatttcttcgtttttcgcaacgaacatgcccaatccactacttaggtccaaaactcatgtttgg

SEQ ID NO: 778 - DNA, 734 bp, Zea mays
  misc_feature (0)...(0): Zea mays BAC clone full insert sequence contig bacm.pk119.a23.fis15
tccgttcgtttgttgttgttacaggaagcacatggaggtggcttaatgggacattttagagcaaagaaaacggaggacatacttgctggtcatttcttttggcccaagatgagaagagatgtggtgagattggttgctcgttgcacgacatgtcaaaaggcgaagtcacggttaaatccacacggtttgtatttgcctctacccgttcctagtgctccttgggaagatatttctatggattttgtgctgggattgcctaggactaggaagggacgtgatagtgtgtttgtggttgttgatagattttctaagatggcacatttcataccatgtcataaaactgacgatgctactcatattgctgatttgttctttcgtgaaattgttcgcttgcatggtgtgcccaacacaatcgtttctgatcgtgatgctaaatttcttagtcatttttggaggactttgtgggcaaaattggggactaagcttttattttctactacatgtcatcctcaaactgatggtcaaactgaagttgtgaatagaactttgtctactatgttaagggcagttctaaagaagaatattaagatgtgggaggactgtttgcctcatcttgaatttgcttataatcgatcattgcattctactacaaagatgtgcccatttcagattgtatatggtttgttgcctcgtgctcctattgatttaatgcctttgccatcttctgaaaaact

SEQ ID NO: 779 - DNA, 1158 bp, Zea mays
  misc_feature (0)...(0): Zea mays BAC clone full insert sequence contig bacm.pk119.a23.fis16
aatcgggtgtcgggtgcatacaaagcacgagtttttgccaccggaaccatttcttcgtttttcgcaacgaacaggcccaatccactactttaggtccaaaactcatgtctggggtggtttcctgcaatttcgttgccgcacgtcacccattccgaaaacgggtgtcgggtgcatacaaagcacaacattttgccaccgggaccatttcttcgtttttcgcaacgaatatgcccaatccactactttaggtcccaaactcatgtttgaggtggtttcgcgcaatttcgttgtcgcacgtcacccacttcgaaaactagtgttggggtgcatacaaagcacgagtttttgccaccggaaccatttcttcgtttttcgcaacgaacatgcccaatccactactttaggtccaaaactcacgattagggtggtttcgcgcaatttcgttgtcgcacgtcacccatccgaaaactggtgtcggggtgcatataaaagcacgagtttttgccaccggaaaccatttccttcgttttttcgcaacgaacatgcccactccactactttaggtccaaaactcatgtttgaggtggtttcgcacaatttcgttgtcgcacgtcacccattctgaaaacgggtgttggggtgcataaaagcacgagtttttgccaccggaaccatttctatgtttttcgcaacgaacatgcccaatccactactttaggtccaaaactcatgtttgtggtggtttcgcacaatttcgttgtcgcacgtcacccattccgaaaatgggtgtcggggtgcatacaaagcacgagtttttgccaccggaaccatttcttcgtttttcgcaacgaacatgcccaatccactagtttaggtccaaaactcatgtttggggtggtttcgcgcaatttcgttgtcgcacgtcacccattccgaaaacgggtgtcgggtgcatacaaagcacgagtttttgccaccggaaccatttcttcgtttttcgcaacgaacatgcccaatccactactttaggtccaaaactcatgttttgggtggttttgcgcaatttcgttgccgcacgtcacccattctgaaaacggttatcggtacaaagcacgagtttttgccaccggaaccatttcttcgtttttcgcaacaatg

SEQ ID NO: 780 - DNA, 815 bp, Zea mays
  misc_feature (0)...(0): Zea mays BAC clone full insert sequence contig bacm.pk119.a23.fis17
tctgaaaacggttgtcggggtgcaataaaagcacgagtttttgccaccggaaccatttcttcgtttttcgcaacgaacatgcccaatccactactttaggtccaaaactcatgtttggggtggtttcgcacattttctttgtcgcacgtcacccattccgaaaacgggtgtcggggtgcatacaaagcatgagtttttgccaccggaaccgtttcttcgtttttcgcaacgaatatgcccaatccactattttaggtccaaaactcatgtttggggtggtttcgcgcaatttcgttgtcgcacgtcacccattccgaaaacgggtgtcggggtgcatacaaagcacgagtttttgccacaggaaccatttcttcgtttttcgcaacgaacatgccaaatccactactttaggtccaaaactcatgtttggggtggtttcgcgcaatttcgttgtcgcacgtcacccattccgaaaacgggtttggggtgcatacaaagcacgagtttttgccaccggaaccatttcttcgtttttcgcaacgaacatgcccaatacactactttaggcccaaaactcatgtttggggtggtttctcgcaatttcgttatcgcacgtcacacatttcgaaaacgggtgtcgggtgcatacaaagcacgagtttttgccaccggaaccatttcttcgtttttcgcaacgaacaggcccaatccactactttaggtccaaaactcatgtttggggtggtttcgcgcaatttcgttgtcgcacgtcacccattccaaaaacgggtgtcgggtgcatacaaagcacgtgt

SEQ ID NO: 781 - DNA, 1534 bp, Zea mays
  misc_feature (0)...(0): Zea mays BAC clone full insert sequence contig bacm.pk119.a23.fis18
cattaaactcgtgctttgtatgcaccccgacacccgttttcggaatgggtgacgtgctacaacgaaattgcgcgaaacctccccaaacatgagttttggacctaaagtagtggattaggcatgttcgttgcgaaaaacgaagaaatggttctggtggcaaaaactcgtgctttgtatgcacccgacacccgttttcggaatgggtgaggtgcgacaacgaaattgtgcgaaaccaccccaaacatgagttttgaacctaaagtagtggattaggcatgttcgttgcgaaaaacgaaaaaatggttccggtggcaaaaactcgtgctttgtatgcaccacgatacccgttttccgaatgggtgacgtgcgacaacgaaattgtgcgaaaccaccccaaacatgagttttggacctaaagtagtggatggggcattttcgttgagaaaaaagaagaaatggttcgggtgacaaaaactcgtgttttgtatgcacccgacacccgttttcggaatgggtgacgtgcgacaacgaaattgcgcgaaaccaccccaaacttgagttttgtacctaaagtagtggattgggcatgttcgttgcgaaaaacgaaaaatggttccggtggcaaaaactcgtgctttgtatgcaccccgaaacccgttttcggaatgggtgacgtgcggcaacgaaattgtgtgaaaccacccaaacatgagttttggacctaaagtagtggattgggcatgttcgttgcgaaaaacgaagaaatggttccggtggcaaaaactcgtgcttttatgcaccccgatacccgttttcacaatgggtgacgtgcgacaacgaaattgcgagaaaccacctcaaacatgagttttggacctaaagtagtggattgggcatgttcgttgcgaaaaaagaagaaatggttctgctggcaaaaacttgtgctttgtatgcaccccgacacccgttttcggaatgggtgacgtgcggcaaagaaattgcgcgaaaccaccccaaacatgagttttggacctaaagtagtggattgggcatgttcgttgagaaaaacaaagaaatggttccggtggcaaaaactcgtgctttgtatgcacccgacacccgttttcggaatgggtgacgtgcgacaacaaaattgtgcgaaaccaccccaaacatgagttttggacctaaagtattggattgggcatgttcgttgcaaaaaacgaagaaatggttccggtggcaaaaactcgtgctttgtatgcaccccgacacccgttttcggaatgggtgacgtgctacaacgaaattgcgcgaaacctccccaaacatgagttttggacctaaagtagtggattaggcatgttcgttgcgaaaaacgaagaaatggttctggtggcaaaaactcgtgctttgtatgcacccgacacccgttttcggaatgggtggatgtgcgacaacgaaattgtgcgaaaactcccccaacatgaggtttggacctaaagtagtggatgaggcatgttcgttgcgatat

SEQ ID NO: 782 - DNA, 1908 bp, Zea mays
  misc_feature (0)...(0): Zea mays BAC clone full insert sequence contig bacm.pk119.a23.fis19
ttcggaatgggtgacgtgcgacaacgaaattgcgcgaaaccacccgaaacatgagttttggacctaaagtagtggagtgggcatgttcgttgcgaaaaacgaagaaatggttccggtggcaaaaagtcgtgctttgtatgcacccgacacccgttttcggaatgggtgacgtgcggcaacgaaattgcaggaaaccaccccaaacatgagttttggacctaaagtagtggattgggcatgttcgttgtgaaaatcgaagaaatggttccggtggcaaaaactcgtgctttgtatgcacccgacacccgttttcggaatgggtgacgtgcgacaacgaaattgcgcgaaatcaccccaaacatgagttttggacctagagtagtggattgggcatgttcgttgtgaaaaacgaagaaatggttctggtggcaaaaactcgtcctttgtatgcaccccgacaaccgttttcagaatggttgacgtgctacaacgaaattgcgcgaaaccaccccaaacatgagttttggacctaaagtagtggattgggcatgttcgttgcgaaaaacgaaaaaatggttccggtggcaaaaactcgtgctttgtatgcacccgacaaccgttttcagaatgggtgacgtgcggcaacgaaattgcgcgaaaccaccccaaacatgagttttggacctaaagtagtgcattgggcatgtttgttgtgaaaaacgaagaaatggttccggtggcaaaaacttgtgctttgtatgcaccctgacacccgttttcagaatgggagacgtgcgacatcgaaattgtgtgaaaccaccccaaacatgagttttggacctaaagtagtggattgggcatgttcgttgcgaaaaatgaaaaaatggttccggtggcaaaaactcgtgctttgtatgcaccccgacacccgttttcagaatgggtgacgcgcggcaacgaaattgcgcgaaaccaccccaaacatgagttttggacctaaagtagtggattaggcatgttcgttgcgaaaaacaaagaaatggttccggtggcaaaaactcgtgttttgtatgcacccgacacccgttttcggaatggctaacgtgcgacaacaaaattgtgcgaaaccaccccaaacatgagttttggacctaaagtagtggattgggcatgttcgttgtgaaaaacgaaaaaatggttccggtggcaaaaactcgagcttttaagcaccccaatacccgttttcagaatgggtgacgtgcgacaacgaaattgcgcgaaaccaccccaaacatgagttttggacctaaagtagtggattgggcatgttcgttgcgaaaaacgaagaaatggttccggtggcaaaaactcgtgctttgtatgcacccgacacccgttttcggaatgggtgacgtgcgacaacgaaattgcgcgaaaccaccccaaacatgtgttttggacctaaagtagtggattgggcatgttcgttgcgaaaaacgaataaatggttccggtggcaaaaactcgtgctttgtacgcgccccgacacccgttttccgaatgggtgacgtgcgacaacgaaattgcgcgaaaccaccccaaacatgagttttggacctaaagtagtggattgggcatgttcgttgtgaaaatcgaagaaatggttccggtggcaaaaactcgtgctttgtatgcacccgacacccgttttcggaatgggtgacgtgcgacaacgaaattgcgcgaaatcaccccaaacatgagttttggacctagagtagtggattgggcatgttcgttgtgaaaaacgaagaaatggttctggtggcaaaaactcgtcctttgtatgcaccccgacaaccgttttcagaatggttgacgtgctacaacgaaattgcgcgaaaccac

SEQ ID NO: 783 - DNA, 1342 bp, Zea mays
  misc_feature (0)...(0): Zea mays BAC clone full insert sequence contig bacm.pk119.a23.fis20
ggttacggtgggaaaaaactcgtgctttatatgcacccgacaccagttttcggaatgggtgatgtgcgacaacgaaattgcgcgaaaccaccccaaacatgcgttttggacctaaagtagtggattgggcatggtcgttgcgaaaaacgaagaaatggttccggtggcaaaaactcgtgctttgtatgcaccccgacacccgttttcggaatgggtgacttgggacaacgaaattgtgcgaaaccaccccaaacatgagttttggacctaagtagtggattgggcatgttcgttgcgaaaaacgaagaaatggttctggtggcaaaaactcgtgctttgtatgcacccgacacccgttttcggaatgggtgacgtgcgacaacgaaattgcgcgaaaccaccccaaacatgagttttgaacctaaattagtggattgggcatgttcgttgtgaaaaacgaaaaaatggttctggtggcaaaaactcgtgctttgtatgcacccgacacccgttttcggaatgggtgacgtgcgacaacgaaatttgcgcgaaaccaccccaaacatgcgttttggacctaaagtagtggattgggcatgttcgttgcgaaaaacaaaaaaatggttccggtggcaaaaactcgtgctttgtatgcaccctgacacccgttttcggaatgggtgacttgcgacaacgaaattgtgcgaaaccaccccaaacatgagttttggacctaaagtagtgggattgggcatgttcgttgcgaaaaaacgaaaaaaatggttccggtggcaaaaactcgtgctttgtatgcaccccgacacccgttttcggaatgggtgacgtgctacaacgaaattgcgcgaaacctccccaaacatgagttttggacctaaagtagtggattaggcatgttcgttgcgaaaaacgaagaaatggttctggtggcaaaaactcgtgctttgtatgcacccgacacccgttttcggaatgggtgatgtgcgacaacgaaattgtgcgaaacctccccaaacatgagttttgaacctaaagtagtggattaggcatgttcgttgcgaaaaacgaagaaatggttccggtggcaaaaactcgtgcttttatgcaccccgatacccgttttcagaatgggagacgtgcgacatccaaattgtgtgaaacgaccccaaacatgagttttggacctaaagtagtggattggtcatgttcgttgcgaaaaacgaaaaaatggttccggtggcaaaaactcgtgctttgtatgcaccccgacacccgttttcagaatgggtgacgtgctgcaacgaaattgcgcgaaaccacccca

SEQ ID NO: 784 - DNA, 2393 bp, Zea mays
  misc_feature (0)...(0): Zea mays BAC clone full insert sequence contig bacm.pk119.a23.fis21
cctttaggtccaaaactcatgtttggggtggtttcgcacaatttctttgtcgcacgttagccattccgaaaacgggtgtcgggtgcatacaaagcacgagtttttgccaccggaaccatttctttgtttttcgcaacgaacatgcctaatccactactttaggtccaaaactcatgtttggggtggtttcgcgcaatttcgttgtctcgcgtcacccattctgaaaacgggtgtcggggtgcatacaaagcacgagtttttgccaccggaaccatttcttcatttttcgcaacgaacatgcccaatccactactttaggtccaaaactcatgtttgggttggtttcgcgcaatttcgttgtcgcacgtcacccattctgaaaacgggtattggggtgcataaatgctcgagtttttgccactggaaccatttcttcgtttttcgcaacgaacatgcccaatccactactttaggtccaaaactcatgtttggggtggtttcgcacaatttcgttgtcgcacgttacccattccgaaaacgggtgtcgggtgcatacaaagcacgagtttttgccaccggaaccatttctttgtttttcgcaacgaacatgcctaatccactactttaggtccaaaactcatgtttggggtggtttcgcgcaatttcgttgtcgcgcgtcacccattctgaaaacgggtgtcggggtgcatacaaagcacgagtttttgccaccggaaccatttcttcgtttttcgcaacgaacatgaccaatccactactttaggtccaaaactcatgtttggggtcgtttcacacaatttggatgtcgcacgtctcccattctgaaaacgggtatcggggtgcataaaagcacgagtttttgccaccggaaccatttcttcgtttttcgcaacgaacatgcccaatccactactttaggttcaaaactcatgttgggggaggtttcgcacaatttcgttgtcgcacatcaccctttccggaaacgggtgtcggggtgcatacaaagcacgagtttttgccaccggaaccatttcttcgtttttcgcaacgaacatgcccaatccactactttaggtccaaaactcatgtttggggtggtttcgcacaattttgttgtcgcacgtcacccattccgaaaacgggtgtcgggtgcatacaaagcacgagtttttgccaccggtaccatttctttgtttttctcaacgaacatgcccaatccactactttaggtccaaaactcatgtttggggtggtttcgcgcaatttcgttgccgcacgtcacccattccgaaaacgggtgtcggggtgcatacgaagcacaagtttttgccagcagaaccatttcttcttttttcgcaacgaacatgcccaatccactactttaggtccaaaactcatgtttgaggtggtttctcgcaatttcgttgtcgcacgtcacccattgtgaaaacgggtatcggggtgcataaaagcacgagtttttgccaccggaaccatttctttgtttttcacaacgaacatgcccaatccactactttaggtccaaaactcatgtttgggtggtttcacacaatttcgttgccgcacgtcacccattccgaaaacgggtgtcgggggcatacaaagcacgagtttttgccaccggaaccattttttcgtttttcgcaacgaacatgcccaatccactactttaggtccaaaactcatgtttggggtggtttcgcgcaatttcgttgtcgcacgtcaccccttttgaaaacgggtgtcgggtgcatacaaagcacgagtttttgccaccggaaccatttcttcgtttttcgcaacgaacatgcccaatccactactttaggtccaaaactcatgtttggggtggtttcgcacaatttcgttgtcgcaagtcacccattccgaaaacgggtgtcagggtgcatacaaagcacgagtttttgccaccggaaccatttcttcgtttttcgcaacgaacatgcccaatccactactttaggtccaaaactcatgtttggggtggtttcgcgcaatttcgttgtcgcacgtcacccattccgaaaacgggggtcggggtgcatacaaagcacgagtttttgccaccggaaccatttcttcgtttttcgcaacgaacatgcccaatccactactttaggtccaaaacgcatgtttggggtggtttcgcgcaatttcgttgtcgcacgtcacccattccgaaaacgggtgtcgggtgcatacaaagcaagagtttttgccaccgtaaccatttcttcgtttttcgcaacgaacatgcccaatccacaactttaggtccaaaactcatgtttgggttggtttcgcgcaatttcgttgtcgcatgtcaccca

SEQ ID NO: 785 - DNA, 1826 bp, Zea mays
  misc_feature (0)...(0): Zea mays BAC clone full insert sequence contig bacm.pk119.a23.fis22
tgttggaaagctctcttcgtctactttctggcggctgaagaatcaatgggagaaaccaaacgacacgtccagaaactgtcgagagagcttcgttctccaccagaacttctttctattcctctatttaagcaactagcagccaccaaagaacttgggtttttgtttgatgtaagtttagcctttgctacttccttgtaaacgcgtgtgtcggctagaccacccggatacttgaaacagaaccccaactctatcagatccgtgagcgtctgctttttatcttgttcttgcttgttctcgattgcttgcaggttcaaggttgttcttggcacggcaagagcaacaacaacaggagccagtgtaactatcgctaaggcgcagcacccttgtggttgttgtagtcggatagcacaacgtcgacctccaccccaaatcgtagttaccaggagacggtgtacctgtcgctcaaggcgccacaccatcttggttgtggtagtcgggcagccaacgtcgttctccaacaagttttccacctccatcatctctcatcgaaagatcgggcacccttctacccgttgggttatcatttaggtccaaaactcatgtttggggtggtttcgcgcaatttcgttgtcgcacgtcacccattccgaaaacgggtgtcggggtgcatacaaagcacgagtttttgccaccggaaccatttcttcttttttcgcaacgaacatgcccaatccactactttaggtccaaaactcatgtttgggggtggtttcgcacaatttcgttttcgcacgtcacccattccgaaaacaggtgtcgggtgcatacaaagcacgagtttttgccaccagaacaatttctttgtttgtcgcagcgaacatgcccagtccactactttaggtcaaaaactcatgtttggggtggtttcacgcaatttcgttgtcgcacgtcacccattctgaaaacgggtgtcggggtgcatacaaagcacgagtttttgccaccggaaccatttcttcatttttcgcaacgaacaagcccaatccactactttagatccaaaactcatgtttggggtggtttcgcgcaatttcgatgtcgcacgtcgcccgttccaaaaacgggtgtcgggtgcatacaaagcacgagtttttgccaccggaaccatttcttcgtttttcgcaatgaaattgcccaatccactactttatgtccaaaactcatgtttgggggtggtttcgcgtaattttgttgccgcaagtcaaccattctgaaaacggttgtcggggtgcatacaaagcacgagtttttgccaccgaaaccatttcttcgttttcgcaacgaacatgcccaatccactactttaggtccaaaactcatgtttggggtggtttcgcgcaatttcgttgtcgcacgtcacccattccgaaaacgggtgtcgggtgcatacaaagcacgagtttttgccaccggaaccatttcttcgtttttcgcaacgaacatgcccaatccactactttaggtccaaaactcatgtttggggtggtttcgcacaatttcgttgtcgcacgtcacccattccgaaaacgggtgtcgggtacatacaaagcacgagtttttgccagcggaaccatttctttgtttttcgcaacaaaaatgcccaatccactactttaggtccaaaactcatgtttgaggtggtttcgcgcaatttcgttgtcgcacgtcacccattctgaaaacgggtatcggggtgcataaaagcacgagtttttgccaccggagccatttcttcgtttttcgcaacgaacatgcccaatccacta

SEQ ID NO: 786 - DNA, 3278 bp, Zea mays
  misc_feature (0)...(0): Zea mays BAC clone full insert sequence contig bacm.pk119.a23.fis23
ttgtatgcaccccgacactagttttcggaatgggtgacgtgcgacgacgaaattgcgcgaaaccacctcaaacatgagttttggacctaaagtagtggattgggcatattcgttgcgaaaaacgaagaaacggttccggtggcaaaaactcgtgctttgtatgcacccgacacccgttttcggaatgggtgacgtgcgacaacgaaattgcgcgaaaccaccccaaacatgagttttggacctaaagtagtggattgggcatgttcgttgccaaaaacgaagaaatggttccggtggcaaaaactcgtgctttgtatgcaccccacacccgttttcggaatgggtgacgtgcgacaacgaaattgcgcgaaaccaccccaaacatgagttttggacctaaagtagtggattgggcatgttcgttgccaaaaacgaagaaatggttgcggtggcaaaaactcgtgctttgtatgcaccccgacacccgttttcggaatgggtgacgtgcggcaacgaaattgcgcaaaaccaccccaaacatgagttttggacctaaagtagtggagtgggcatgttcgttgcgaaaaacgaagaaatggttccggtggcaaaaagtcgtgctttgtatgcacccgacacccgttttcggaatgggtgacgtgcggcacgaaattgcaggaaaccaccccaaacatgagttttggacctaaagtagtggattgggcatgttcgttgcgaaaaacgaagaaatggttccggtggcaaaaactcgtgctttgtatgcaccccgacacccgatttcggaatgggtgacgtgcgacaacgaaattgcgcgaaaccacctcaaacatgagttttggacctaaagtagtggattgggcatattcgttgcgaaaaacgaagaaacggttccggtggcaaaaactcgtgctttgtatgcaccctgacaaccgtttttagaatgggtgacgtgcggcaacgaaattgcgcgaaaccaccccaaacatgagttttggacctaaagtagtggattgggcctattcgttgcgaaaaatgaagaaatggttccggtggcaaaaactcatgctttgtaagtacccgacacccgttttcggaataagtgacgtacgacaacgaaattgcgcgaaaccaccccaaacatgagttttggacctaaagtagtggcttgggcatgttcgttgcgaaaaacgaagaaatggttccggtggcaaaaactcgtgctttgtatgcaccccgacaccagttttcggaatgggtgacgtgcggcaacgaaattgcgcaaaaccacctcaaacatgagttttggacctaaagtagaggattgggcatattcgttgcgaaaaacgaagaaacggttccggtggcaaaaactcgtgctttgtatgcactcgacacccgttttcgtaatgggtgacgtgcgacaacgaaattgcgcaaaaccaccccaaacatgagttttggacctaaagttggcatgttcgttgccaaaaacgtagaaatggtcccagtggcaaaaactcgtgctttgtatgcaccccgacaaccgttttcagaatgggtgacgtgcggcaacgaaattgcgcaaaaccacctcaaacatgagttttggacctaaagtagtggagtgggcatattcgttgcgaaaaacgaagaaatggttccggtggcaaaaactcgtgctttgtatgcaccctgacaaccgtttttagaatgggtggcgtgcggcaacgaaattgcgcgaaaccaccccaaacatgagttttggacctaaagtagtggattgggcatgttcgttgcgaaaaacgaaaaaaatggttccggtggcaaaaactcgtgctttggtatgcacccgacacccgttttcggaatgggtgacgtgcgacaacgaaaatttgcgcgaaaccaccccacacatgagttttggacctaaagtagtggattgggcatgttcgttgcgaaaaacaaagaaatggtcccggtggcaaaaactcgtgctttgtatgcaccccgacactgttttcagagtgggtgacgtgcgacaacgatattgtgcgacaccacccaacacatgatttgtagacataagtagtggattgggcatgttcgttgagaaaaacgaagaaatgtttctggtggcaaaaactcgtgctttgtatgcacccgacacccgttttcggaatgggtgacgtgcgacaacgaaattgcgcgaaaccaccccaaacatgagttttggacctagattagtggattgggcatgttcgttgtgaaaaacgaagaaatggttctggtggcaaaaactcgtgctttgtatgcacccgacacccgttttcggaatgggtgacgtgcgacaacgaaatttgcgcgaaaccaccccaaacatgcgttttggacctaaagtagtggattgggcatgttcgttgcgaaaaacaaaaaaatggttccggtggcaaaaactcgtgctttgtatgcaccctgacacccgttttcagaatgggtgacttgcgacaacaaaattgtgcgaaaccacccaaacatgagttttggacctaaagtagtggattgggcatgttcgttgcgaaaaacgaaaaaatggttccggtggcaaaaactcttgcttttgtatgcacccgacacccgttttcggaatgggtgacgtgcgacaacgaaattgcgcgaaaccaccccaaacatgagtttttgacctaaagtagtggattgggcatgttcgttgcgaaaaacgaataaatggttccggtggcaaaaactcgtgctttgtacgcgccccgacacccgttttccgaatgggtgacgtgcgacaacgaaattgcgcgaaaccaccccaaacatgagttttggacctaaagtagtggattgggcatgttcgttgtgaaaaacgaagaaatggttccggtggcaaaaactcgtgctttgtatgcacccgacacccgttttcggaatgggtgacgtgcgacaacgaaattgagcgaaaccaccccaaacatgagttttggacctagagtagtggattgggcatgttcgttgtgaaaaacgaagaaatggttccggtggcaaaaactcgtgctttgtatgcaccccgacaaccgttttcagaatggttgacgtgctacaacgaaattgcgcgaaaccaccccaaacatgagttttggacctaaagtagtggattgggcatgttcgtttcgaaaaacgaaaaatggttccggtggcaaaaactcgttctttgtatgcacccgacaccc

SEQ ID NO: 787 - DNA, 3891 bp, Zea mays
  misc_feature (0)...(0): Zea mays BAC clone full insert sequence contig bacm.pk119.a23.fis24
tgacgtgcgacaacgaaattgcgcgaaaccacctcaaacatgcgttttgggacaaaaagtagtggatggggcatattcgttgcgaaaaacgaagaaatggttccggtggcaaaatgttgtgctttgtatgcacccgacacccgttttcggaatgggtgacgtgcgacaacgaaattgcgggaaaccaccccagacatgagttttggacctaaagtagtggattgggcctgttcgttgcgaaaaacgaagaaatggttccggtggcaaaaactcgtgctttgtatgcacccgacacccgatttcgaaatgtgtgacgtgcgataacgaaattgcgagaaaccaccccaaacatgagttttggacctaaagtagtggattgggcatgttcgttgtgaaaaacgaagaaatggttccggtggcaaaaactcgtgctttgtatgcactccacacccgttttcggaatgggtgacgtgcgacaacgaaattgcgcgaaaccaccccaaacatgagttttggacctaaagtagtggatttggcatgttcgttgcgaaaaacgaagaaatggttcctgtggcaaaaactcgtgctttgtatgcaccccgacacccgttttcggaatgggtgacgtgcgacaacgaaattgcgcgaaaccacccgaaacatgagttttggacctaaaatagtggattgggcatattcgttgcgaaaaacgaagaaacggttccggtggcaaaaactcatgctttgtatgcaccccgacacccgttttcggaatgggtgacgtgcgacaaagaaattgtgcgaaaccaccccaaacatgagttttggacctaaagtagtggattgggcatgttcgttgcggaaaacgaaaaaatggttccggtggcaaaaactcgtgcttttattgcaccccgacaaccgttttcaaaatgggtgacgtgcggcaacaaaattgcgcaaaaccaccccaaacatgagttttgtacctaaagtagtggattgggcatgtttgttgcgaaaaacgaagaaatggttccggtggcaaaaactcgtgctttgtatgcacccgacaccctgttttcggaataggtgacgtacgacaacgaaattgcgcgaaaccaccccaaacatgagttttggacctaaagtagtggattgggcatgttcgttgccaaaaacgaagaaatggttccggtggcaaaaacttgtgctttgtatgcaccccgacaaccgttttcagaatgggtgacgtgcggcaacgaaattgcgcaaaactacctcaaacatgagttttggacctaaagtagtggagtgggcatgtttgttgcgaaaaacgaagaaatggtttcggtggcaaaaacgcgtgctttgtatgcaccctgacaaccgtttttagaatgggtgacgtgcggcaacgaaattgcgcgaaaccaccctaatcatgagttttggacctaaagtagtggattgggcatgttcgttgcgaaaaacgaagaaatggttccggtggcaaaaactcgtgctttgtatgcaccccaacactagttttcggaatgggtgacgtgcgacaacgaaattgcgcgaaaccacctcaaacatgagttttggacctaaagtagtggattgggcatattcgttgcgaaaaacgaagaaatggttccggtggcaaaaagttgtgctttgtatgcacccgacacccgttttcggaatgggtgacgtgcggcaacgaaattgcaggaaaccaccccaaacatgagttttggacctaaagtagtggattgggcctgttcgttgcgaaaaacgaagaaatggttccggtggcaaaaactcgtgctttgtatgcacccgacacccgttttcgaaatgtgtgacgtgcgataacgaaattgcgagaaaccaccccaaacatgagttttggacctaaagtagtggattgggcatgttcgttgcgaaaaacgaagaaatggttccggtggcaaaaactcgtgctttgtatgcaccccgacactagttttcggaatgggtgacgtgcgacgacgaaattgcgcgaaaccacctcaaacatgagttttggacctaaagtagtggattgggcatattcgttgcgaaaaacgaagaaacggttccggtggcaaaaactcgtgctttgtatgcacccgacacccgttttcggaatgggtgacgtgcgacaacgaaattgcgcgaaaccaccccaaacatgagttttggacctaaagtagtggattgggcatgttcgttgccaaaaacgaagaaatggttccggtggcaaaaactcgtgctttgtatgcaccccacacccgttttcggaatgggtgacgtgcgacaacgaaattgcgcgaaaccaccccaaacatgagttttggacctaaagtagtggattgggcatgttcgttgccaaaaacgaagaaatggttccggtggcaaaaactcgtgctttgtatgcacccgacacccgttttcggaatgggtgacgtgcgacaacgaaattgcgcgaaaccaccccaaacatgagttttggacctaaagtagtggattgggcatgttcgttgcgaaaaacgaagaaatgttcccggcggcaaaaactcgtgctttgtatgcacccgacacccgttttcgtaatgggtgacgtgcggcaacgaaattgcgcgaaaccaccccaaacatgagttttggacctaaagtagtggattgggcatgttcgttgccaaaaacgaagaaatggttccggtggcaaaaactcgtgctttgtatgcaccccacacccgttttcggaatgggtgacgtgcgacaacgaaattgcgcgaaaccaccccaaacatgagttttggacctagagtagtggattgggcatgttcgttgtgaaaaacgaagaaatggttctggtggcaaaaactcgtgctttgtatgcacccgacacccgttttcggaatgggtgacgtgcgacaacgaaatttgcgcgaaaccaccccaaacatgcgttttggatctaaagtagtggattgggcatgttcgttgcgaaaaacaaagaaatggttccggtggcaaaaactcgtgctttgtatgcaccccgacacccgttttcggaatgggtgacttgcgacaacgaaattgtgcgaaaccaccccaaacatgagttttggacctaaagtagtggattgggcatgttcgttgcgaaaaacgaagaaatggttctggtggcaaaaactcgtgctttgtatgcaccccgacacccgttttcggaatgggtgacgtgctacaacgaaattgcgcgaaccctccccaaacatgagttttggacctaaagtagtggatcaggcatgttcgttgcgaaaaacgaagaaatggttctggtggcaaaaactcgtgctttgtatgcacccgacacccgtttccggaaagggtgatgtgcgacaacgaaattgtgcgaaacctccccaaacatgagttttgaacctaaagtagtggattgggcatgttcgttgcgaaaaacgaagaaatggttccggtggcaaaaactcgtgcttttatgcaccccgatacccgttttcagaatgggagacgtgcgacattgaaattgtgtgaaacgaccccaaacatgagttttggacctaaagtagtggattgggcatgttcgttgcgaaaaacgaagaaatggttccggtggcaaaaactcgtgctttgtatgcaccccgacacccgttttcagaatgggtgacgcgcggcaacgaaattgcgcgaaaccaccccaaacatgagttttggacctaaagtagtggattaggcatgttcgttgcgaaaaacaaagaaatggtttcggtcgcaaaaactcgtgctttgtatgcacctgacacccgttttcggaatggctaa

SEQ ID NO: 788 - DNA, 2192 bp, Zea mays
  misc_feature (0)...(0): Zea mays BAC clone full insert sequence contig bacm.pk119.a23.fis25
ctgtgcatgtttgttgcgaaaaatgaagaaatggttccggtggcaaaaactcgtgctttgtatgcaccccgacacccgttttcagaatgggtgacgtgcggcaacgaaattgcgtgaaaccaccccaaacatgagtttttgacctaaagtagtggattgggcatgttcgttgcgacaaacaaagaaattgttttggtggcaaaaactcgtgctttgtatgcacccgacacccgttttcggaatgggtgacgtgcgacaacgaaattgcgcgaaaccaccccaaacatgagttttggacctaaagtagtggattgggcatattcgttgcgaaaaacgaatagatgattccggtggcaaaaactcgtgctttgtatgcaccagacacccgttttcggaatgggtgacgtgctacaacgaaattgcgcgaaaccaccccaaacatgagttttggacctaaagtagtggattgggcatgttcgttgcgaaaaacgaagaaatggttccggtggcaaaaactcgtgctttgtatgcaccccgacaaccgttttcagaatgggtgacgtgcggcaacgaaattgcgcgaaaccaccccaaacatgagttttggacctaaagtagtggattgggcatgttcgttgcgaaaaacgaaaaaatggttccggtggtaaaaactcgtgctttgtgtgcacccgacacccgttttcggaatgggtgacgtgcgacaacgaaattgtgagaaaccaccccaaacatgagttttggacctaaagtagtggattggacatgttcgttgtgaaaaacgaagaaatggttccggtggcaaaaactcgtgcttttatgcaccccgatacccgttttcagaatgggtgacgtgcgacaacgaaattgcgcgaaaccacctcaaacatgagttttagacccaaagtagtggattgggcatgtttgtagcgaaaaacaaagaaatggttccggtggcaaaaactcgtgctttgtatgcaccccgacacccgttttcggaatgggtgacgtgcgacaacgaaattgtgcgaaaccacccaaacatgagttttggacctaaagtagtggattgggcatgttcgttgcgaaaaacaaagaaatggttccggtggcaaaaactcgtgctttgtctggacccgacacctgttttcggaatgggtgacgtgcgacaaaaattgtgcgaaaccaccccaaacatgagttttggacctaaatagtggattgggcatgttcgttgcgaaaaatgaagaaatggttccggtggcaaaaactcgtgctttgtatgcaccccgacacccgatttcagaatgggtgacgtgcggcaacgaaattgcgtgaaaccaccccaaacatgagtttttgacctaaagtagtggattgggcatgttcgttgcgacaaacaaagaaattgttctggtggcaaaaactcgtgctttgtatgcaccccgacacccgttttcggaatgggtgacgtgcgaaaacgaaattgtgcgaaaccacccccaaacatgagttttggacctaaagtagtggattgggcatgttcgttgcgaaaaaagaagaaatggttccggtggcaaaaactcgtgctttgtatgcaccccgacacccgttttcggaatgggtgacgtgcgacaacgaaattgcgcgaaaccaccccaaacatgagttttggacctaaagtagtggattgggcatattcgttgcgaaaaacgaagaaatgattccggtggcaaaaactcgtgctttgtatgcaccagacacccgttttcggaatgggtgacgtgctacaacgaaattgcgcgaaaccaccccaaacatgagttttggacctaaagtagtggattgggcatgttcgttgcgaaaaacgaagaaatggttccggtggcaaaaactcgtgctttgtatgcaccccgacaaccgttttcagaatgggtgacgtgcggcaacgaaattgcgcgaaaccaccccaaacatgagttttggacctaaagtagtggattgggcatgttcgttgcgaaaaacaaaaaaatggttccggtggtaaaaactcgtgctttgtgtgcacccgacacccgttttcggaatgggtgacgtgggacaacgaaattgggagaaaccaccccgaacaaaaattttggacttatagtagtggattggggatgtttgttggg

SEQ ID NO: 789 - DNA, 3645 bp, Zea mays
  misc_feature (0)...(0): Zea mays BAC clone full insert sequence contig bacm.pk119.a23.fis26
tgtgttggggtggtttctcgcaatttcgttgtcgcacgtcacccatttcgaaaacgggtgttggggtgcatacaaagcacgagtttttgccaccggaaccatttcttcgtttttcgcaacgaacatgcccaatccactactttaggtccaaaactcatgtttggggtggtttcgcgcaatttccttgtcgcacgtcacccattccaaaaacgggtgtcagggtgcatacaaagcacgaatttttgccaccggaaccatttcttcctttttcgcaacgaacatgcccactccactactttaggtccaaaactcatgtttgaggtggtttcgcgcaatttcgttgtcgcacgtcacccatttcgaaaacgggtgtcggggtgcatacaaagcacgagtttttgccagcggaaacatttcttcgtttttcgcaacgaacatgcccaactcactactttaggtccaaaactcatgtttgaggtggttttgcgcaatttcgttgccgcacgtcacccattctgaaaacggttgtcggggtgcatataaaacacgagtttttgccaccagaaccgttttttcgttttttcacaacgaacatgccccaatccactactttaggtacaaaactcatgtttggggtggtttcgcgcaatttcgttgccgcacgtcacctgttctgaaaacggttgtcggggtgcatacaaagcacgagtttttgccgccggaaccatttcttcgtttttcgcaacgaacatgcccaatccactactttaggtccaaaactcatgtttggggtggtttggcgtaacttcgttgccgcacgtcaaccattctgaaaacgggtgtcggggtgcatacaaagcacgagtttttgccaccggaaccattttaacgtttttcgcaacgaacatgcccaatccactactttaggtccaaaactcatgtttggggtggtttcgcgcaatttcgttgtcgcacgtcgcccgttccgaaacgggtgtcgggtgcatacaaagcacaagtttttgcctccggaaccatttcttcgtttttcacagcgaacttgcccaatccactactttaggtccaaaactcatgtttggggtggtttcgcgtaatttcgttgccccacgtcaaccattctgaaaacagttgtccgggtgcatacaaagcacgagtttttgccaccggaaccatttctttgttttcgcaacgaacatgcccaatccactactttaggtccaaaactcatgtttggggtggtttcgcgcaatttcgttgtcgcacgtcacccattctgaaaacggttgtcggggtgcatacaaagcacgagtttttgccaccagaaccatttcttcgtttttcgcaacgaacatgcccaatccactactttaggtccaaaactcatgtttggggtggtttcgcgcaatttcgttgccgcacgtcacccgttctgaaaacggttgtcggggtgcatacaaagcacgagtttttgccgccagaaccatttcttcatttttcgcaacaaacatgcccaatccactactttaggtccaaaactcatgtttgcggtggtttcgcgcaatttcattgtcgcacgtcacccattccaaaaacgggtgtcggggtgcatacaaagctcgtagtttttgccagcggaaccatttcttcgtttttcgcaacgaacgtgcccattccactactttaggtccaaaactcatttttgaggtggtttcgcgcaatttcgttgtcgcatgtcactcattctgaaaacgggtatcggggtgcataaaagcacgagtttttgccaccggaatcatttcttcgtttttcgcaacgaacatgcccaatccactatttaggtccaaaactcatgtttggggtggtttcgcacaatttcgttgtcgcacgtcacccattccgaaaacgggtgtcgggtgcatacaaagcacgagtttttgccgccggaaccatttcttcgtttttcgcaacgaatatgcccaatccactactttaggtccaaaactcatgtttggggtggtttcgcgtaatttcgttgccgcacgtcaaccattctgaaaacgggtgtcggggtgcatacaaagcacgagtttttgccaccggaaccatttcttcgtttttcgcaacgaacatgcccaatccactactttaggtccaaaactcatgtttggggtggtttcgcgcaatttcgttgtcgcacgtcgcccgttccgaaacgggtgtcgggtgcatacaaagcacaagtttttgccaccggaaccatttcttcgtttttcgcaacgaacttgcccaatccactactttaggtccaaaactcatgtttggggtggtttcgcgaaatttcgttgccccacgtcaaccattctgaaaacggttgtcagggtgcatacaaagcacgagtttttgccaccggaaccatttctttgttttcgcaacgaacatgcccaatccactactttaggtccaaaactcatgtttggggtggtttcgcgcaatttcgttgtcgcacgtcacccattccgaaaacgggtgtcgggtgcatacaaagcacgagttttagccaccggaaccattttttcgtttttcgcaacgaacatgcctaatccactactttaggtccaaaactcatgtttggggtggtttcgcgcaatttcgttgtcgcacgtcacccattctgaaaacggttgtcggggtgcatacaaagcacgagtttttgccaccggaaccatttcttcgtttttcgcaacgaacatgcccaatccactactttaggtccaaaactcatgtttggggtggtttcgcgcaatttcgttgccgcacgtcacccgttctgaaaacggttgtcggggtgcatacaaagcacgagtttttgccgccagaaccatttcttcatttatcgcaacaaacatgcccaatccactactttaggtccaaaactcatgtttgggttggtttcgcgcaatttcattgtcgcacgtcacccattccgaaaacgggtgtcggggtgcatacaaagtgatgaagctgaggtgcccgatctttcggcgagtagagataattccgatttgtcggaagatgacccttgcgatccgactacgacgagcaagcccgaggcgccaatgcaatcgctgaaccaactccctgtggttaccgaccttgctgatgcgagatcggcctgatcacgaagatcgtttcctgtgcgcaatcgaagaacgaacaagaacaagatgcgagcaatctaatctattactcgagggtggagttctgaatacacgaagacagcgcagatttgcgcgtgttcgagagtagctaaggctaacgtaaaacaaaactcgggaaataaaggaggcgcagctcctgaataaatagagagggggcgcagcccctaggggcggccaaccctaggtcgtccattatgggccgcaattgggctggtcgtctattcttccgggccttcgttctttaacaacatgatgtagttcaattctcttgcacgggcccgagtcactggcccaggtggaaggggtggcgcctgggctggagaaggtgctgctggtgtagatgtgctcgtgttggtgttgatgtccgcatcatcctccccttcttgaactgaagtcatcctcgacg

SEQ ID NO: 790 - DNA, 2026 bp, Zea mays
  misc_feature (0)...(0): Zea mays BAC clone full insert sequence contig bacm.pk119.a23.fis27
cggcatttttttttttcccttccacattttgtaaaaaggggtttagggggcataaaaatgccggttttttgtcccccgggtcttttttttttttttttccaaaccgaatacgcccacttcctttttttaggtcaaaatacgcgttgttgggggggtttttggcaaaattccgttcccccctttcaaactattcgaaaaggcgggtttaaggggaataaaaagcaggagttttacccaccgaaacctttttttctttgttcacaacgaacagccccattccacttctttggcccaaaacctcatgttggggggggtttgtcgcaatttcgttatcgcacgtcacacatttcgaaatcgggtgtcgggtgcatacaaagcacgagtttttgccaccggaaccatttcttcgtttttcgcaacgaacaggcccaatccactactttaggtccaaaactcatgtctggggtggtttcctgcaatttcgttgccgcacgtcacccattccgaaaacgggtgtcgggtgcatacaaagcacaacattttgccaccggaaccatttcttcgtttttcgcaacgaatatgcccaatccactactttaggtccaaaacgcatgtttgaggtggtttcgcgcaatttcgttgtcgcacgtcacccattccgaaaactagtgttggggtgcatacaaagcacgagtttttgccaccggaaccatttcttcgtttttcgcaacgaacatgcccaatccactactttaggtccaaaactcatgtttggggtggtttcgcgcaatttcgttgccgcacgtcacccattctaaaaacggttgtcagggtgcatacaaagcacgcgtttttgccaccgaaaccatttcttcgtttttcgcaacgaacatgcccactccactactttaggtccaaaactcatgtttgaggtagttttgcgcaatttcgttgccgcacgtcacccattctgaaaacggttgtcggggtgcatacaaagcacaagtttttgccaccggaaccatttcttcgtttttggcaacgaacatgcccaatccactactttaggtccaaaactcatgtttggggtgggttcgcgcaatttcgttgtcgcacgtcacccattccgaaaacgggtgtggggtgcatacaaagcacgagtttttgccaccggaaccatttcttcgtttttcgcaacgaacatgcccaatccactactttaggtccaaaactcatgtttggggtggtttctcgcaatttcgttatcgcacgtcacacatttcgaaaacgggtgtcgggtgcatacaaagcacgagtttttgctaccggaaccgtttcttcgtttttcgcaacgaacaggcccaatccactattttaggtccaaaactcatgtttggggtggtttctcgcaatttcgttatcgcacgtcacacattacgaaaacgggtgtcgggtgcatacaaagcacgagtttttgccgccggaaccatttcttcgtttttggcaacgaacatgcccaatccactaatttaggtccaaaactcatgtttggggtggtttcgcgcaatttcgttgtcgcacgtcacccattccgaaaacgggtgtcgggtgcatagaaagcacgagtttttgccaccggaaccgtttcattgtttttcgcaacgaatatacccaatccactactttaggtccaaaactcatgtttgaggtggtttcgcgcaatttcgttgtcgcacgtcacccattccgaaaactagtgtcggggtgcatacaaagcacgagtttttgccaccggaaccatttcttcgtttttcgcaacgaacatgcccaatccactactttaggtccaaaactcatgtttggggtggtttcgcgcaatttcgttgtcgtacgtcacctattccgaaaacaggtgtcgggtgcatacaaagcacgagtttttgccaccggaaccatttcttcgtttttcgcaacaaacatgcccaatccactactttaggtacaaaactcatgtttggggttgtat

SEQ ID NO: 791 - DNA, 2882 bp, Zea mays
  misc_feature (0)...(0): Zea mays BAC clone full insert sequence contig bacm.pk119.a23.fis28
gcgtcaccctattttggcccaatgggtcgtgtatcaagttaggtccattagggacgcatcctagggttgcagcacgacctcaatacccttgtggtcgtcctcccatgtttataaaccccctagccgccaccaagaacagcgggttttgtttagatcaagtttagctctcgctacttgcttgcaagcgcgcgtgctagttcagccgcccgtcttcttgtcttcggaaccccaccatattggagtttgatttttaaacctacatttagatctggtaattcagtacttgttctacttgttcttgctagttcttcgattgcttgcaggacgagtgccctagtggccaaggtgtcacgctccacaagatcgtgacaaccataggaggtggtgtatcggttgctaaggcgcagcgtctttggaaggctgtagtcgggccgtgaacgtcgtctcctcccccaatcgagttattccacaccctctcatcgaaagatcgggcaatcacccaacgggtacatcatagtggattgggcatattcgttgcgaaaaacgaagaaacggttccggtggcaaaaactcatgctttgtatgcactccgacacccgttttcggaatgggtgacgtgcgacaaagaaattgtgcgaaaccaccccaaacatgagttttggacctaaagtagtggattgggcatgttcgttgcgaaaaacgaagaaatggttcctttggaaaaaactcgtgcttttatgcaccccgatacccattttcagaatgagtgacgtgcgacaacgaaattgcgcaaaaccacctcaaacatgagttttggacctaaagtagtggattgggcatgttcgttgcgaaaagcgaagaaatggttccagtggcaaaaactcgtgctttgtatgcaccccgacacccgttttcggaatgggtgacgtgcgacaacgaaattgtgcgaaaccaccccaaacatgagttttggacctaaagtagtggattgggcatgttcgttgcgaaaaacgaagaaatggtaccggtggcaaaaactcgtgctttgtatgcacccgacaccttttttcggaatgggtgacgtgcgacaacgaaaatgcgcgaaaccaccccaaacatgagttttggacctaaagtagtggattgggcatgttcgttgcgaaaaacgaagaaatggttccggtggcaaaaactcgtgcttttattgcacccgacaaccgttttcagaatgggtgacgtgcggcaacgaaattgcgtgaaaccaccccaaacatgagtttttgacctaaagtagtggattgggcatgttcgttgcgacaaacaaagaaattgttttggtggcaaaaactcgtgctttgtatgcacccgacacctgttttcggaatgggtgacgtgcgaaaacgaaattgtgcgaaaccacccccaaacatgagttttggacctaaagtagtggattgggcatgttcgttgcgaaaaaagaagaaatggttccggtggcaaaaactcgtgctttgtatgcaccccgacacccgttttcggaatgggtgacgtgcgacaacgaaattgcgcgaaaccaccccaaacatgagttttggacctaaagtagtggattgggcatattcgttgcgaaaaacgaagaaatgattccggtggcaaaaactcgtgctttgtatgcaccaaacacccgttttcggaatgggtgacgtgcgacaacgaaattgcgcgaaaccaccccaaacatgagttttggacctaaagtagtggattgggcatgttcgttgcgaaaaacgaagaaatggttccgttggcaaaaactcgtgctttgtttgcaccccgacacccatttttggaatgggtgacgtgcgacaacaaaattgcgcgaaaccaccccaaacatgagttttggacctaaagtagtggattgggcatattcgttgcgaaaaacgaaaaattgattccggtggcaaaaactcgtgctttgtatgcacccgacacccgttttcagaatgggtgacttgcgacaacaaaattgcgcgaaaccaccccaaacatgagttttggacctaaagtagtggattgggcatgttcgttgcgaaaaacgaagaaatggttccggtggcaaaaacacgtgctttgtatgcaccccgacaaccgttttcaaaatgggagacgtgcggaaacgaaattgcgcgaaaccacctcaaacatgagttttggacctaaaatagtggattgggcatgttcgttgcgaaaaacgaaaaaatggttccggtggcaaaaactcgtgctttgtatgcacccgacacccgttttcggaatgggtgacgtgcgacaacgaaattgtgtgaaaccacccgaaacatgagttttggacctaaagtagtggattgggcattttcgttgcgaaaaacgaagaaatggttccgatggcaaaaactcgtgcttttttatgcaccccgatacccgttttcagaatgggtgacgtgcgacaacgaaattgtgcgaaaccacccgaaacatgagttttggacctaaagtagtggattgggcatttttgttgcgaaaacaaagaaatggttccgctggcaaaaactcgtgctttgtatgcaccccgacacccgttttcggaatgggtgacgtgcgacaacgaaattgtgcgaaaccaccccaaacatgagttttggacctaaagtagtggattgggcatgttcgttgcgaaaaaagaaaaaatggttccggtggcaaaaactcgtgctttgtatgccccccacccccgtttttggaaagggggaagtgcggcaaccaaattgcgcgaaacccccccaaacattaggtttagacctaaagtagtggaatggggatgttcgttggcaaaaaaaaaa

SEQ ID NO: 792 - DNA, 3557 bp, Zea mays
  misc_feature (0)...(0): Zea mays BAC clone full insert sequence contig bacm.pk119.a23.fis29
tgagttttgaacctatagtagtggattgggaatgttcgttgcgaaaaacgaagaaatggttccggtggcaaaaactcgtgctttgtatgcaccccgataaccgttttcagaacgggtgacgtgcggcaacgaaattgcgcgaaaccaccccaaacatgagttttggtcctaaagtagtggatcgggcatgttcgttgcgaaaaacgaagaaatggttcctgtggcaaaaactcgtgctttgtatgcaccccgacacccgttttcggaatgggtgacgtgcgacaacgaaattgcgcgaaaccaccccaaacatgagttttggacctaaagtagtggattgggcatgttcgttgcgaaaaacgaagaaatggttccggtggcaaaaactcgtgctttgtatgcaccccgacaccagttttcggaatgggtgacgtgcggcaacgaaattgcgcaaaaccacctcaaacatgagttttggacctaaagtagtggattgggcatattcgttgcgaaaaacgaaaaaacggttccggtggcaaaaactcgtgctttgtatgcaccctgacaaccgtttttaaaatgggtgacgtgcggcaacaaaattgcgcgaaaccaccccaaacatgagttttggacctaaagtagtggattgggcctattcgttgcgaaaaatgaagaaatggttccggtggcaaaaactcatgctttgtaagtacccgacacccgttttcggaataagtgacgtacgacaacgaaattgcgcgaaaccaccccaaacatgagttttggacctaaagtagtggattgggcatgttcgttgcgaaaaacgaagaaatggttccggtggcaaaaactcgtgctttgtatgcaccccgacacccgttttcggaatgggtgacgtgcgacaacgaaattgcgcgaaaccaccccaaacatgagttttggacctaaagtagtggattgggcatgttcgttgcgaaaaacgaagaaatggttcctgtggcaaaaactcgtgctttgtatgcaccccgacacccgttttcggaatgggtgacgtgcgacaacgaaattgcgcgaaaccacccgaaacatgagttttggacctaaagtagtggagtgggcatgttcgttgcgaaaaacgaagaaatggttccggtggcaaaaagtcgtgctttgtatgcacccgacacccgttttcggaatgggtgacgtgcggcaacgaaattgcaggaaaccaccccaaacatgagttttggacctaaagtagtggattgggcatgttcgttgcgaaaaacgaagaaatggttccggtggcaaaaactcgtgctttgtatgcacccgacacccgatttcgaaatgtgtgacgtgcgataacgaaattgcgagaaaccaccccaaacatgagttttggacctaaagtggtggattgggcatgttcgttgtgaaaaacgaagaaatggtttcggtggcaaaaactcgtgctttgtatgcactccacccccgttttctgaatgggtgacgtgcgacaacgaaattgcgcgaaaccaccccaaacatgagttttggacctaaagtagtggattgggcatgttcgttgcgaaaaacgaagaaatggttcctgtggcaaaaactcgtgctttgtatgcaccccgacagccgttttcggaatggttgacgtgcgacaacgaaattgcgcgaaaccaccccaaacatgagttttggacctaaaatagtggattgggcatattcgttgcgaaaaacgaagaaacggttccggtggcaaaaactcatgctttgtatgcaccccgacacccgttttcggaatgggtgacgtgcgacaaagaaattgtgcgaaaccaccccaaacatgagttttggacctaaagtagtggattgggcatgttcgttgcggaaaacgaagaaatggttccggtggcaaaaactcgtgcttttattgcaccccgacaaccgttttcagaatgggtgacgtgcggcaacgaaattgcgcaaaaccaccccaaacatgagttttgtacctaaagtagtggattgggcatgtttgttgcgaaaaacgaaaaaatggttccggtggcaaaaactcgtgctttgtatgcacccgacacctgttttcggaataggtgacgtacgacaacgaaattgcgcgaaaccaccccaaacatgagttttggacctaaagtagtggattgggcatgttcgttgcgaaaaacgaagaaatggttccggtggcaaaaactcgtgctttgtatgcaccccgacactagttttggaaatgggtgacgtgcgacaacgaaattgcgcgaaaccacctcaaacatgagttttggacctaaagtagtggattgggctattttcgttgcgaaaaacaatgaaacggttccggtggcaaaaactcgtgctttctatgcacccgacacccgttttcggaatgggtgacgtgcgacaacgaaattgcgcgaaaccaccccaaacatgagttttggacctaaattagtggattgggcatgttcgttgccaaaaacgaagaaatggttccggcggcaaaaactcgtgctttgtatgcacccgacacccgttttcgtaatgtgtgacgtgcgataacgaaattgcgcgaaaccaccccaaacatgagttttggacctaaagtagtggattgggcatgttcgttgccaaaaacgaagaaatggttccggtggcaaaaactcgtgctttgtatgcaccccacacccgttttcggaatgggtgacgtgcgacaacgaaattgcgcgaaaccaccccaaacatgagttttggacctaaagtagtggattgggcatgttcgttgccaaaaacgaagaaatggttgcggtggcaaaaactcgtgctttgtatgcagcccgacacccgttttcggaatgggtgacgtgcggcaacgaaattgcgcaaaaccaccccaaacatgagttttggacctaaagtagtggagtgggcatgttcgttgcgaaaaacgaagaaatggttccggtggcaaaaactcgtgctttgtatgcaccccgacacccgttttcggaatgggtgacgtgcggcaacgaaattgcgcgaaaccaccccaaacttgagttttggagctaaagtagtggattgggcatttttgttgcgaaaaacgaagaaatggttccggtggcaaaaactcgtgctttgtatgcacccgacacccgttttcggaatgggtgacgtgggacaacgaaattgcgagaaaccaccccaaacctgagttttggacctaaagtagtggattgggcattttcgttgggaaaaacgaagaaatggttccggtggcaaaaactcgtgctttgtatccaaccgacaaccgttttcggaatgggtgacgtgcgacaacgaaattgtgcgaaaccaccccaaacatgagttttggacctaaagtagtggattaggcatgttcgttgcgaaaaacgaagaaatggttccggtggcaaaaactcgtgctttgtacgcaccccgacacccgttttcagaatgggtgacgtgcggcaacgaaa

SEQ ID NO: 793 - DNA, 3814 bp, Zea mays
  misc_feature (0)...(0): Zea mays BAC clone full insert sequence contig bacm.pk119.a23.fis30
ttgggggtggtttcgcacaatttcgttttcgcacgtcacccattccgaaaacaggtgtcgggtgcatacaaagcacgagtttttgccaccaaaacaatttctttgtttgtcgcaacgaacatgcccaatccactactttaggtcaaaaactcatgtttggggtggtttcacgcaatttcgttgccgcacgtcacccattctgaaaacgggtgtcggggtgcatacaaagcacgagtttttgccaccggaaccatttcttcatttttcgcaacaaacatgcccaatccactactttagatccaaaactcatgtttgggggggtttcgcgcaatttcgttgtcgcacgtcgcccgttccgaaaacgggtgtcgggtgcatacaaagcacgagtttttgcgaccgaaaccatttctttgtttttcgcaacgaacatgcctaatccactactttaggtccaaaactcatgtttggggtggtttcgcgcaatttcgttgtcgcacgtcacccattctgaaaacgggtatcggggtgcataaaagcacgagtttttgccaacggaaccatttcttcgtttttcgcaacgaaaatgcccaatccactactttaggtccaaaactcatgtttggggtgggttcgcacaatttcattgtcgcacgtcacccattccgaaaacgggtgtcggggtgcataaaaagcacgagtttttgccaccggaaccatttctttttttttcgcaacgaacatgcccgatccactactttaggagccaaactcatgtttgggggggtttcgcgcaaattcgttgccgcacgtcaccctttccgaaaacgggtgtcggggtgcatacaaagcacgagttttttgccaccggaaccatttcttcgtttttcgcaacgaacatgccccatccactactataggttcaaaactcatgtttggggtggtttcgcgcaatttcgttgtcgcacgtcacccaattctgaaaacgggtgtcggggtgcaaacaaagcacgagttttttccaccggaaccattttttttgttttttcgcaacgaacatgcccaatccactactttaggtccaaaacgcatgtttggggtggtttcgcgcaaatttcgttgtcgcacgtcacccattccgaaaacgggtgtcgggtgcatacaaagcacgagtttttgccaccagaaccatttcttcgtttttcacaacgaacatgcccaatccactactctaggtccaaaactcatgtttggggtggtttcgcgcaatttcgttgtcgcacgtcacccattccgaaaacgggtgtcgggtgcatacaaagcacgagtttttgccaccagaaccatttcttcgtttttcgcaacgaacatgcccaatccactacttaggtccaaaactcatgtttggggtggtttcgcacaatttcgttgtcgcaagtcacccattccgaaaacgggtgtcggggtgcatacaaagcacgagtttttgccaccggaaccatttcttcgtttttcgcaacgaacatgcccaatccactactttaggtccaaaacgcatgtttggggtggtttcgcgcaatttcgttgccgcacgtaacccattccgaaaactggtgtcgggtgcatataaagcacgagttttttccaccgtaaccatttcttcgtttttcgcaacgaacatgcccaatccactactttaggtccaaaactcatgtttgggttggtttcgcacaatttcgttgtcgcacgtcacccattctgaaaacgggtattggggtgcataaaagcacgagtttttgccactggaaccatttcttcgtttttcgcaacgaacatgcccaatccactactttaggtccaaaactcatgtttgtggtggtttcgcacaattttgttgtcgcacgttagccattccgaaaatgggtgtcgggtgcatacaaaacacgagtttttgacaccggaaccatttctttgtttttcgcaacgaacatgcctaatccactactttaggtccaaaactcatgtttggggtggtttcgcgcaatttcgttgccgcgcgtcacccattctgaaaacgggtgtcggggtgcatacaaagcacgagtttttgccaccggaaccatttcttcatttttcgcaacgaacatgcccaatccactactttaggtccaaaactcatgtttggggtggtttcgcacaatttcgatgtcgcacgtcacccattctgaaaacgggtgtcagggtgcatacaaaagcacaagtttttgccaccggaaccatttcttcgtttttggcaacgaacatgcccaatccactaatttaggtccaaaactcatgtttggggtggtttcgcgcaatttcgttgtcgcacgtcacccattccgaaaacgggtgtcgggtgcatagaaagcacgagtttttgccaccggaaccgtttcattgtttttcgcaacgaacatacccaatccactactttaggtccaaaacttcattgtttggggtggtttcgcgcaatttcgttgtcgcacgtcacccattccgaaaactggtgtcggggtgcatacaaagcacgagtttttgccaccggaaccatttcttcgtttttcgcaacgaacatgcccaatccactactttaggtccaaaactcatgtttggggtggtttcgcgcaatttcgttgtcgtacgtcacccattccgaaaacgggtgtcgggtgcatacaaagcacgagtttttgccaccggaaccatttcttcgtttttcgcaacaaacatgcccaatccactactttaggtacaaaactcatgtttggggtggttttgcgcaatttcgttgccgcacgtcacccattctgaaaacggttgtcggggtgcaataaaagcacgagtttttgccaccggaaccatttcttcgttttccgcaacgaacatgcccaatccactactttaggtccaaaactcatgtttggggtggtttcgcacaatttctttgtcgcacgtcacccattccgaaaacgggtgtcggggtgcatacaaagcacgagtttttgccacaggaaccatttcttcgtttttcgcaacgaacatgccaaatccactactttaggtccaaaactcatgtttggggtggtttcgcgcaatttcgttgtcgcacgtcacccattccgaaaacgggtgtggagtgcatacaaagcacgagtttttgccaccggaaccatttcatcgtttttcgcaacgaacatgcccaatccactacttgaggtccaaaactcatgtttggggtggtttcgcgcaatttcgtcgtcgcacgtcacccattccgaaaacgggtgtcgggtgcatacaaagcacgagtttttgccactggaaccatttcttcgtttttcgcaacagaacatgcccaatcccctactttaggtacaaaactcatgtttgggggtggttttgcgcaaattcgttgccgcacgtcacccattctgaaaaccggtgtcggggtgcatacaaagcacgagtttttgccaccggaaccatttcttcgttttccgcaacgaacatgcccaatccactactttaggtccaaaactcatgtttggggtggtttcgcacaatttctttgtcgcacgtcacccattccgaaaacgggtgtcggggtgcatacaaagcatgagtttttgccaccggaaccgtttcttcgtttttcgcaacgaatatgcccaatccactattttaggtccaaaactcatgtttggggtggtttcgcgcaatttcgttgtcgcacgtcaaccattccgaaaacggctgtcggggtgcatacaaa

SEQ ID NO: 794 - DNA, 3418 bp, Zea mays
  misc_feature (0)...(0): Zea mays BAC clone full insert sequence contig bacm.pk119.a23.fis31
cggttgtcagggtgcatataaagcacgagtttttgccaccagaaccatttcttcgtttttcgcaacgaacatgcccaatccactactttaggtccgaaactcatgtgttggggtggtttctcgcaatttctttgtcgcacgtcacccatttcgaaaacggggtgttggaggggcatacaaagcacgagtttttgccaccgaaaacatttccttcgtttttcgcaacgaacatgcccactccactactttaggtccaaaactcatgtttgagggggtttcgcgcaatttcgttgtcgcacgtcacccattccgaaaacgggtgtcgggtgcatacaaagcgcgagtttttgccaacggaacctttttttttttttcgtaacgaaaaagccccatccactactttaggtccaaaactcatgtttggggtggtttcgcgcaaatttgttgtcgcacgtcacccatttcgaaaacgggtgttgggtgcatacaaagcacgagtttttgccaccggaaccatttttttgtttttcgcaacgaacatgcccaatccactactttaggtccaaaactcatgtttggggtggtttcgcacaattttgttgtcgcaagtcacccattccgaaacgggtgtcagggtgcatacaaagcacgagtttttgccaccggaaccatttcttcgtttttcgcaacgaacatgcccaatccactactttaggtccaaaacgcatgtttggggtggtttcgcgcaaatttcgttgtcgcacgtcacccattccgaaaacgggtgtcgggtgcatacaaagcacgagtttttgccaccagaaccatttcttcgtttttcgcaacgaacatgcctaatccactactttaggtccaaaactaatgtttggggaggtttcgcgcaatttcgttgtagcacgtcacccattccgaaaacgggtgtcggggtgcatacaaagcacgagtttttgccaccggaaccatttcttcgtttttcgcaacgaacatgcccaatccactactttaggtccaaaactcatgtttggggtggtttcgcacaattttgttgtcgcacgtcacccattccgaaaacgggtgtcgggtgcatacaaagcacgagtttttgccaccggtaccatttctttgtttttctcaacgaacatgcccaatccactactttaggtccaaaactcatgtttggggtggtttcgcgcaatttcgttgccgcacgtcacccattccgaaaacgggtgtcggggtgcatacgaagcacaagtttttgccagcagaaccatttcttcttttttcgcaacgaacatgcccaatccactactttaggtccaaaactcatgtttgaggtggtttctcgcaatttcgttgtcgcacgtcacccattgtgaaaacgggtatcggggtgcataaaagcacgagtttttgccaccggaaccatttctttgtttttcacaacgaacatgcccaatccactactttaggtccaaaactcatgtttgggtggtttcacacaatttcgttgccgcacgtcacccattctgaaaacgggtgtcgggtgcatacaaagcacgagtttttgccaccggaaccatttctttttttttcgcaacgaacatgcccaatccactactctaggtccaaaactcatgtgtggggtggtttcgcgcaaatttcgttgtcgcacgtcacccattccgaaaacgggtgtcgggtgcatacaaagcacgagtttttgccatcggaaccatttctttgtttttcgcaacgaacatgcccaatccactactttaggtccaaaactcatgtttggggtggtttcgcacaatttcgttgtcgcacgtcacccattccgaaaacgggtgtcggggtgcatacaaagcacaagtttttgccaccggaaccatttctttttttttcgcaacaaaaatgcccaatccactactttaggtccaaaactcatgtttgaggtggtttcgcgcaatttcgttgtcgcacgtcacccattctgaaaacgggtatcggggtgcataaaagcatgagtttttgccactggaaccatttcttcgtttttcgcaacgaacatgcccaatccactgtttaggtccaaaactcatgtttggggtggtttcgcccaatttttgtcgcacgtcacccattccgaaaacgggtgtcgggtgcatacaaagcacgagttttttccaccagaaccatttctttgtttttcgcaacgaacatgcccaatccactactttaggtccaaaactcatgtttgggtggtttcgcaccaatttcgttgtcgcacgtcacccattccgaaaacgggtgtcggggtgcatacaaagcacgagtttttgccaccggaaccatttctttgtttttcgctacaaacatgcccaatccactactttaggtccaaaactcatgtttgaggtggtttcgcgcaatttcgttgtcgcacgtcacgcattctgaaaacgggtatcggggtgcataaaagcacgagtttttgccaccggaaccatttcttcgtttttcgcaacgaacatgcccaatccactactttaggtccaaaactcatgtttggggtggtttcacacaatttcgttgtcgcacgtcactcattccgaaaacgggtgtcgggtggatacaaaacacgagtttttaccaccgaaacatttttcgtttttcgcaacgaacatgcccaatccactattttaggtcaaaaactcatgtttgcggtggtttcgcgcaatttcgtttccgcacgtcacccattctgaaaacggttgtcggggtgcatacaaagcacgtgtttttgccaccggaaccatttcttcgtttttcgcaacgaacatgcccaatccactactttaggtctaaaactcatgtttggggtggtttcgcgcaattttgttgtcgcacgtcacccattccgaaaacgggtgtcgggtgcatacaaagcacgagtttttgccaccggaatcattttttcgtttttcgcaacgaatatgcccaatccactactttaggtccaaaactcatgtttggggtggtttcgcgcaatttcgttgtcgcacgtcacccattccgaaaacgggtgtcggggtgcatacagagcacgaatttttgccaccggaaccatttcttcttttttcgcaacgaacatgcccaatccactactttaggtccaaaactcatgtttgggggtggtttcgcacaatttcgttttcgcacgtcacccattccgaaaactggtgtcgggtgcatacaaagcacgagtttttgccaccagaacaatttctttgtttgtcgcaacgaacatgcccaatccactactttaggtcaaaaactcatgtttggggtggtttcacgcaatttcgttgccgcacgtcacccattctgaaag

SEQ ID NO: 795 - DNA, 5722 bp, Zea mays
  misc_feature (0)...(0): Zea mays BAC clone full insert sequence contig bacm.pk119.a23.fis32
tgttgcgaaaaacgaagaaatggttccggtggcaaaaactcgtgctttgtatgcacccgacacctgttttcggaataggtgacgtacgacaacgaaattgcgcgaaaccaccccaaacatgagttttggacctaaagtagtggattgggcatgttcgttgcgaaaaacgaagaaatggttccggtggcaaaaactcgtgctttgtatgcaccccgacactagttttcggaatgggtgacgtgcgacaacgaaattgcgcgaaaccacctcaaacatgagttttggacctaaagtagtggattgggcatattcgttgcgaaaaacaatgaaacggttccggtggcaaaaactcgtgctttgtatgcacccgacacctgtcttcggaatgggtgacgtgcgacaacgaaattgcgcgaaaccaccccaaacatgagttttggacctaaattagtggattgggcatgttcgttgccaaaaacgaagaaatggttccggtggcaaaaactcgtgctttgtatgcacccgacacccgttttcgaaatgtgtgacgtgcgataacgaaattgcgagaaaccaccccaaacatgagttttggacctaaagtagtggattgggcatgttcgttgtgaaaaacgaagaaatggttccggtggcaaaaactcgtgctttgtatgcaccccgacacccgttttcggaatgggtgacgtgcgacaacgaaattgcgcgaaaccaccccaaacatgagttttggacctaaagtagtggattgggcatgttcgttgagaaaaacaaaaaaatggttctggtggcaaaaactcgtgctttgtatgcacccgacacccgttttcggaatgggtgacgtgcgacaacaaaattgtgcgaaaccaccccaaacatgagttttggacctaaaggagtggattgggcatgttcgttgcgaaaaacgaagaaatggttccggtggcaaaaactcgtgctttgtaagcaccccgacacccgttttcggaatgggtgacgtgctacaacgaaattgcgcgaaacctccccaaacatgagttttggacctaaagtagtggattaggcatgttcgttgcgaaaaacgaaaaaattgttctggtggcaaaaactcgtgctttgtatgcacccgacacccattttcggaatgggtgatgtgcgacaaccaaattgtgcgaaacctccccaaacatgagttttggacctaaagtagtggattaggcatgttcgttgcgaaaaacgaagaaatggttctggtggcaaaaactcgtgctttgtatgcacccgacacccgttttcggaatgggtgacgtgcgacaacgaaatttgcgcgaaaccaccccaaacatgcgttttggacctaaagtagtggattgggcatgttcgttgcgaaaaacgaagaaatggttccggtggcaaaaactcgtgctttgtatgcaccctgacacccgttttcggaatgggtgacttgcgacaacaaaattgtgcgaaaccaccccaaacatgagttttggacctaaagtagtggattgggcatgttcgttgcgaaaaacaaaaaaatggttccggtggcaaaaactcgtgctttgtatgcacccgacacccgttttcggaatgggtgacgtgcgacaacgaaattgcgcgaaaccaccccaaacatgagttttggacctaaagtagtggattgggcatgttcgttgcgaaaaacgaagaaatggttccggtggcaaaaactcgtgctttgtatgcacccgacacccgttttcggaatgggtgacgcgggacaacgaaaccgcgcgaaacccacccaaacctgagttttggacctaaagtagtggattgggcatgttcgttgcgaaaaacgaagaaatggttccggtggcaaaaactcgtgctttgtatgcaccccgacacccgttttcggaatgggtgacttgcgacaacgaaattgcgcgaaaccaccccaaacatgagttttggacctaaagtagtggattgggcatgttcgttgcgaaaaacgaagaaatggttccggtggcaaaaactcgtgctttgtagcacccgacacctgttttcagaataggtgacgtgcgacaacgaaattgcgcgaaaccaccccaaacatgagttttggacctaaagtagtggattgggcatgttcgttgcgaaaaaggaagaaatggttccggtggcaaaaacttgtgctttgtatgcaccccgacactagttttcggaatgggtgacgtgcgacaacgaaattgcgcgaaaccacctcaaacatgagttttggacctaaagtagtggattgggtattttcgttgcgaaaaacaatgaaacggttccggtggcaaaaactcgtgctttgtatgcacccgacacccgttttcggaatgggtgacgtgcgacaacgaaattgcgcgaaaccaccccaaacatgagttttggacctaaattagtggattgggcatgttcgttgccaaaaacgaagaaatggttccggcggcaaaaactcgtgctttgtatgcacccgacacccgttttcgtaatgtgtgacgtgcgataacgaaattgcgagaaaccaccccaaacatgagttttggacctaaaatagtggattgggcctgttcgttgcgaaaaacgaagaaacggttccggtagcaaaaactcgtgctttgtatgcacccgacacccgttttcgaaatgtgtgacgtgcgataacgaaattgcgagaaaccaccccaaacatgagttttggacctaaagtagtggattgggcatgttcgttgcgaaaaacgaagaaatggttccggtggcaaaaactcgtgctttgtatgcaccccacacccgttttcggaatgggtgacgtgcgacaacgaaattgcgcgaaaccaccccaaacatgagttttggacctaaagtagtggattgggcatgttcgttgccaaaaacgaagaaatggttccggtggcaaaaactcgtgctttgtatgcaccccgacaaccgttttcagaatgggtgacgtgcggcaacgaaattgcgcaaaaccccctcaaacatgagttttggacctaaagtagtggagtgggcatgttcgttgcgaaaaacgaagaaatggtttcggtggcaaaaacgcgtgctttgtatgcaccctgacaaccgtttttggaatgggtgacgtgcggcaacgaaattgcgcgaaaccaccctaatcatgagttttggacctaaagtagtggattgggcatgttcgttgcgaaaaacgaagaaatggttccggtggcaaaaactcgtgctttgtatgcacccgacacccgttttcggaatgggtgacgtgcgacaacgaaattgtgcgaaaccaccccaaacatgagttttggacctaaatagtggattgggcatgttcgttgcgaaaaacgaagaaatggttccggtggcaaaaactcgtgcttttatgcaccccgatacccgttttcagaatgggtgacatgcgacaacgaaattgcacgaaaccacctcaaacatgagttttggacctaaagtagtagattgggcacgttcgttgcgaaaaacgaagaaatggttccgctggcaaaaactcgtgctttgtgatgcggacatcaacaccaacacgagcacatctacaccagcagcaccttctccagcccaagcgccaccccttccacctgggccagtgactcgggcccgtgcaagagaattgaactacatcatgttgttaaagaacgaaggcccggaagaatagacgaccagcccaattgcggcccataatggacgacctagggttggccgcccctaggggctgcgccccctctctatttattcaggagctgcgcctcctttatttcccgagttttgttttacgttagccttagctactctcgaacacgcgcaaatctgcgctgtcttcgtgtattcagaactccaccctcgagtaatagattagattgctcgcatcttgttcttgttcgttcttcgattgcgcacaggaaacgatcttcgtgatcaggccgatctcgcatcagcaaggtcggtaaccatagggagttggttcagcgattgcattggcgcctcgggcttgctcgtcgtagtcggatcgcaagggtcatcttccgacaaatcggaattatctctactcgccgaaagatcgggcacctcagcttcatcaattggtatcagatttccaggttgatcggtgagtttatcgagcgtttttttttcctacagtccacaaaaccgcataaaaaattcaggttagatcttatcccagcacccttttgagcctcgcactttctttcaataatctgcattgttgaatttgtgtgctttcgcgtcatttgttgctggttgcattgtgttcttccaccattcaaaccctagcgccgccaccatctcccgtttgatcacgccacaaaccgagtcaacggccgtttccttgattttctccttcggttacgaaaaaaaacagaaaaaaaaacaaaccgagtcaacgaccgcttccttgtttttctccttcggttacatcaaaaaaaaaacagaaacaaaaaaaagaaaacgaaggagaaaggatacgtttgtttcatcccggtcgtttttaaaacataacttgaggaaccttccgtaaaccgggcataacttttcgctcgagtgtccaaaaaatctgaaatttttacaggagctagttgacaccattctgaaaacatcccggtctgtttggggttcgacaaaattgtcaaaaaaattcaggaaaataaagaaaaaaatccgtcaaagttctcgcacgcttttcagagaacttcctgattttctgtagaccacatctgatatctgttttaggtgaaacttcgtgtagctcctatcttgttgcttcttgtgctgagaaaaatatcaaaaaaatcatacaaaaaagaaaaacaaaaatcacctgtgatttctactagtgcctttttggcatcactagtacaatatttacggtactgccattctgctagttccatccatcctttgcacctgtggccagcaatatagtttcgtgttttgcactataattcaactttgcattattgtttgatcgtgctaatccttgacttgagtgcagcctacccacaactccacatatttctacgacgagcaggtttctgtttctccacgcaatcgctcatccaatctttcactagttccacctgttggttgcagttcaccactgtggcttggtaagaacagataagaacttgataacagcactagtgtgagcgccttgtgagcagtacacccctgtttttgtcgttggtttttctccttttggtgtttgcgctaactatggcaggagcacacgacatggtggatgcccagttgcaggaagtaaggggacaagttgatggacttgccgctgacattaggacgatgcatgaacggcttgattcaacgatcacttcgacgaccgagcgtttcaaccaacttgaccttgctcaaacggcgactcgcaccacactcgacaccatcctggcacgccttgatgcattgaccacaaagatggagcaggaatacggcggtgacactgagcaggacgatggagatcgccgtggtcgtgcacgtcgtgtggttcgtcatccccctaatgacttattttctaagattaaatttaaaattccatcttttaatggtaaatatgatcctgctgcatatcttgatt

SEQ ID NO: 796 - DNA, 5091 bp, Zea mays
  misc_feature (0)...(0): Zea mays BAC clone full insert sequence contig bacm.pk119.a23.fis33
ctttgtatgcacccgacacccgttttcggaatgggtgacgtgcgacaataaaattgtgtgaaaccaccccaaacatgagttttgaacctaaagtagtggattgggcatgttcgttgcgaaaaacgaagaaatggttccggtggcaaaaactcgtgctttgtatgcaccccaacacccgttttttggaaggggagacgtgccaacacaaatttgcgcaaaacccccccaaacaagattttgggacctaatatagtggattgcgcatgttctgtgcaaaaaacaaaaatggggttcgtgtggcaaaaactcgtgctttgtacgcgccccgacacccgttttccgaatgggtgacgtgcgacaacgaaattgcgcgaaaccaccccaaacatgagttttggacctaaagtagtggattgggcatgttcgttgtgaaaaacgaagaaatggttccggtggcaaaaactcgtgctttgtatgcacccgacacccgttttcggaatgggtgacgtgcgacaacgaaattgcgcgaaaccaccccaaacatgagttttggacctaaagtagtggattgggcatgttcgttgcgaaaaacgaagaaatggttctggtggcaaaaactcgtgctttgtatgcaccccgacacccgttttcagaatgggtgacgtgcgacaacgaaattgcgcgaaaccaccccaaacatgagttttggacctaaagtagtggattgggcatgttcgttgcgaaaaacgaagaaatggttccggtggcaaaaactcgtgctttgtatgcacccgacaaccgttttcagaatgggtgacgtgcggcaacgaaattgcacgaaaccaccccaaacatgtgttttggacctaaagtagtgcattgggcattttcgttgggaaaaacgaagaaatggttccagtggcaaaaactcgggcttttatgccccccaatacccgttttcagaatgggtgacgtgcgacaacgaaattgcgcgaaaccaccccaaacatgagttttggacctaaagtagtggattgggcatgttcgttgcgaaaaacgaagaaatggttacggtggcaaaaactcgtgctttgtatgcacccgacaccagttttcggaatgggtgacgtgcgacaacgaaattgcgcgaaaccaccccaaacatgtgttttggacctaaagtagtggattgggcatgttcgttgcgaaaaacgaataaatggttccggtggcaaaaactcgtgctttgtacgcgccccgacacccgttttccgaatgggtgacgtgcgacaacgaaattgcgcgaaaccaccccaaacatgagttttggacctaaagtagtggattgggcatgttcgttgtgaaaatcgaagaaatggttccggtggcaaaaactcgtgctttgtatgcacccgacacccgttttcggaatgggtgacgtgcgacaacgaaattgcgcgaaatcaccccaaacatgagttttggacctagagtagtggattgggcatgttcgttgtgaaaaacgaagaaatggttctggtggcaaaaactcgtcctttgtatgcacccggacaaccgttttcagaatggttgacgtgctacaacgaaattgcgcgaaaccaccccaaacatgagttttggacctaaagtagtggattgggcatgttcgttgcgaaaaacgaaaaaatggttccggtggcaaaaactcgtgctttgtatgcacccgacaaccgttttcagaatgggtgacgtgcggcaacgaaattgcgcgaaaccaccccaaacatgagttttggacctaaagtagtgcattgggcatgtttcgttgtgaaaaacgaagaaatggttccggtggcaaaaactcgtgctttgtatgcaccctgacacccgttttcagaatgggagacgtgcgacatcgaaattgtgtgaaaccaccccaaacatgagttttggacctaaagtagtggattgggcatgttcgttgcgaaaaacgaaaaaatggttccggtggcaaaaactcgtgctttgtatgcaccccgacacccgttttcaaaagggggaaggggcgccaccaaatttgcgcaaaacccccccaaacatgatttttgaaccaaaagtagggaattgggcttgtccgttgcaaaaaacaaaaaaatgtttccggtggcaaaaaactcgtcctttgtttgcccccgacaccagttttcggaatgggtgacgtgcgacaacgaaattgcgcgaaaccaccccaaacatgagttttggacctaaagtagtggattgggcatgttcgttgcgaaaaacgaataaatggttccggtggcaaaaactcgtgctttgtacgcgccccgacacccgttttcagaatgggtgacgtgcgacaacgaaattgcgcgaaaccaccccaaacatgagtttgggacctaaagtagtggattgggcatgttcgttgcgaaaatcgaagaaatggttccggtggcaaaaactcgtgctttgtatgcacccgacacccgttttcggaatgggtgacgtgcgacaacgaaattgcgcgaaatcaccccaaacatgagttttggacctagagtagtggattgggcatgttcgttgtgaaaaacgaagaaatggttacggtggcaaaaactcgtcctttgtatgcaccccgacaaccgttttcagaatggttgacgtgctacaacgaaattgcgcgaaaccaccccaaacatgagttttggacctaaagtagtggattgggcatgttcgttgcgaaaaacgaaaaaatggttccggtggcaaaaactcgtgctttgtatgcacccgacaaccgttttcagaatgggtgacgtgcggcaacgaaattgcacgaaaccaccccaaacatgtgttttggacctaaagtagtgcattgggcatgtttgttgtgaaaaacgaagaaatggttccggtggcaaaaactcgtgctttgtatgcaccctgacacccgttttcagaatgggagacgtgcgacatcgaaattgtgtgaaaccacccaaacatgagttttggacctaaagtagtggactgggcatgttcgttgcgaaaaatgaagaaatggttccggtggcaaaaactcgtgctttgtatgcaccccgacacccgttttcagaatgggtgacgcgctgcaacgaaattgcgcgaaaccaccccaaacatgagttttggacctaaagtagtggattaggcatgttcgttgcgaaaaacaaagaaatggttccggtggcaaaaactcgtgctttgtatgcacccgacacccgttttcggaatggctaacgtgcgacaacaaaattgtgcgaaaccaccccaaacatgagttttggacctaaagtagtggattgggcatgttcgttgcgaaaaacgaagaaatggttccagtggcaaaaactcgagcatttatgcaccccaatacccgttttcagaatgggtgacgtgcgacaacgaaattgcgcgaaaccaacccaaacatgagttttggacctaaagtagtggattgggcatgttcgttgcgaaaaatgaagaaatggttccggtggcaaaaactcgtgctttgtatgcaccccgacacccgttttcagaatgggtgacgcgggacaccgaaattgcgcgaaaccaccccaaacatgagttttggacctaaagtagtggattaggcatgttctttgcgaaaaacaaaaaaaatggttccggtggcaaaaacctcgtgctttgtatgcaccccgacacccgtttttcgaaattgggtgacgtgcgacaacgaaattgtgccgaaaccaccccaaacatgagttttggacctaaagtagtggatggggcatgttcgttgcgaaaacgaagaaatggttccggtggcaaaaactcgtgcttggtatgcactcgacacccgttttcggaatgggtgacgtgcgacaacgaaattgcgcgaaaccaccccaaacatgagttttggacctaaagtagtggattgggcatgttcgttgcgaaaaacgaagaaatggttcctgtggcaaaaactcgtgctttgtatgcacccccgacacccgttttcggaatgggtgacgtgcgacaacgaaattgcgcgaaaccacccgaaacatgagttttggacctaaaatagtggattgggcatattcgttgcgaaaaacgaagaaacggttccggtggcaaaaactcatgctttgtatgcaccccgacacccgttttcggaatgggtgacgtgcgacaaagaaattgtgcgaaaccaccccaaacatgagttttggacctaaagtagtggattgggcatgttcgttgcggaaaacgaagaaatggttccggtggcaaaaactcgtgcttttattgcaccccgaccaccgttttcagaatgggtgacgtgcggcaacgaaattgcgcaaaaccaccccaaacatgagttttgtacctaaagtagtggattgggcatgttcgttgcgaaaaacaaagaaatggttccggtggcaaaaactcgtgctttgtatgcacccgacacccgttttcggaataggtgacgtgcgacaacgaaattgcgcgaaaccaccccaaacatgagttttggacctaaagtagtggattgggcatgttcgttgcgaaaaacgaagaaatggttccggtggcaaaaactcgtgctttgtatgcaccccgacacccgttttcggaatgggtgacgtgcgacaacgaaattgcgcgaaaccaccccaaacatgagttttggacctaaagtagtggattgggcatgttcgttgcgaaaaacgaagaaatggttccggtggcaaaaactcgtgctttgtatgcacccgacacccgttttcggaatgggtgacgtgcggcaacgaaattgcgggaaaccaccccaaacatgagttttggacctaaagtagtggattgggcatgttcgttgcgaaaaacgaagaaatggttccggtggcaaaaactcgtgctttgtatgcacccgacacccgatttcgaaatgtgtgacgtgcgataacgaaattgcgagaaaccaccccaaacatgagttttggacctaaagtggtggattgggca

SEQ ID NO: 797 - DNA, 4210 bp, Zea mays
  misc_feature (0)...(0): Zea mays BAC clone full insert sequence contig bacm.pk119.a23.fis34
atgagttttggacctaaagttggcatgttcgttgccaaaaacgtagaaatggtcccagtggcaaaaactcgtgctttgtatgcaccccgacaaccgttttcagaatgggtgacgtgcggcaacgaaattgcgcaaaaccacctcaaacatgagttttggacctaaagtagtggagtgggcatattcgttgcgaaaaacgaagaaatggttccggtggcaaaaactcgtgctttgtatgcaccctgacaaccgtttttagaatgggtggcgtgcggcaacgaaattgcgcgaaaccaccccaaacatgagttttggacctaaagtagtggattgggcatgttcgttgcgaaaaacgaagaaatggttccggtggcaaaaactcgtgctttgtatgcacccgacacccgttttcggaatgggtgacgtgcggcaacgaaattgcgcgaaaccaccccaaacatgagttttggacctaaagtagtggattgggcctgttcgttgcgaaaaacaaagaaatggttccggtggcaaaaactcgtgctttgtatgcacccgacacccgttttcgaaatgtgtgacgtgcgataacgaaattgcgagaaaccaccccaaacatgagttttggacctaaagtagtggattgggcatgttcgttgcgaaaaacgaagaaatggttccggtggcaaaaactcgtgctttatatgcaccctgacaaccgttttcagaatgggtgacgtgcggcaacgaaattgcgcgaaaccaccccaaacatgagttttggacctaaagtagtggattgggcatgttcgttgcgaaaaacgaagaaacggttccggtggcaaaaactcgtgctttgtatgcacccgacaccccgtttttcggaatgggtgacgtgcgacaacgaaattgcgcgaaatcaccccaaacatgagttttggacctaaagtagtggattgggcatgttcgttgcgaaaaacgaagaaatggttccggtggcaaaaactcgtcctttgtatgcaccccgacaaccgttttcagaatggttgacgtgctacaacgaaattgcgcgaaaccaccccaaacatgagttttggacctaaagtagtggattgggcatgttcgttgcgaaaaacgaaaaaatggttccggtggcaaaaactcgtgctttgtatgcacccgacaaccgttttcagaatgggtgacgtgcggcaacgaaattgcgcgaaaccaccccaaacatgagttttggacctaaagtagtgcattgggcatgtttgttgtgaaaaacgaagaaatggttccggtggcaaaaacttgtgctttgtatgcaccctgacacccgttttcagaatgggagacgtgcgacatcgaaattgtgtgaaaccaccccaaacatgagttttggacctaaagtagtggattgggcatgttcgttgcgaaaaatgaagaaatggttccggtggcaaaaactcgtgctttgtatgcaccccgacacccgttttcagaatgggtgacgcgcggcaacgaaattgcgcgaaaccaccccaaacatgagttttggacctaaagtagtggattaggcatgttcgttgcgaaaaacaaagaaatggttccggtggcaaaaactcgtgttttgtatgcacccgacacccgttttcggaatggctaacgtgcgacaacaaaattgtgcgaaaccaccccaaacatgagttttggacctaaagtagtggattgggcatgttcgttgcgaaaaacgaagaaatggttccagtggcaaaaactcgagcatttatgcaccccaatacccgttttcagaatgggtgacgtgcgacaacgaaattgcgcgaaaccaacccaaacatgagttttggacctaaagtagtggattgggcatgttcgttgcgaaaaacgaagaaatggttacggtggcaaaaactcgtgctttgtatgcacccgacacccgttttcggaatgggtgacgtgcgacaacgaaattgcgcgaaaccaccccaaacatgtgttttggacctaaagtagtggattgggcatgttcgttgcgaaaaacgaataaatggttccggtggcaaaaactcgtgctttgtatgcgccccgacacccgttttccgaatgggtgacgtgcgacaacaaaattgcgcgaaaccaccccaaacatgagttttggacctaaagtagtggattgggcatgttcgttgtgaaaatcgaagaaatggttccggtggcaaaaactcgtgctttgtatgcacccgacacccgttttcggaatgggtgacgtgcgacaacgaaattgcgcgaaatcaccccaaacatgagttttggacctagagtagtggattgggcatgttcgttgtgaaaaacgaagaaatggttacggtggcaaaaactcgtcctttgtatgcaccccgacaaccgttttcagaatggttgacgtgcgacaacgaaattgcgcgaaaccaccccaaacatgagttttggacctaaagtagtggattgggcatgttcgttgcgaaaaacgaaaaaatggttccggtggcaaaaactcgtgctttgtatgcacccgacaaccgttttcagaatgggtgacgtgcggcaacgaaattgcgcgaaaccaccccaaacatgagttttggacctaaagtagtggattgggcatgtttgttgtgaaaaacgaagaaatggttccggtggcaaaaacttgtgctttgtatgcaccctgacacccgttttcagaatgggagacgtgcgacatcgaaattgtgtgaaaccaccccaaacatgagttttggacctaaagtagtggattgggcatgttcgttgcgaaaaatgaagaaatggttccggtggcaaaaactcgtgctttgtatgcaccccgacacccgttttcagaatgggtgacgcgcggcaacgaaattgcgcgaaaccaccccaaacatgagttttggacctaaagtagtggattaggcatgttcgttgcgaaaaacaaaaaaatggttccggtggcaaaaactcgtgttttgtatgcacccgacacccgttttcggaatggctaacgtgcgacaacgaaattgtgcgaaaccaccccaaacatgagttttggacctaaagtagtggattgggcatgttcgttgcgaaaaacgaagaaatggttccagtggcaaaaactcgagcatttatgcaccccaatacccgttttcagaatgggtgacgtgcgacaacgaaattgcgcgaaaccaacccaaacatgagttttggacctaaagtagtggattgggcatgttcgttgtgaaaaacgaagaaatggttacggtggcaaaaactcgtgctttgtatgcacccgacacccgttttcggaatgggtgaagtgcgacaacgaaaatgcgcgaaaccaccccaaacatgtgttttggacctaaagtagtggattgggcatgttcgttgtgaaaaacgaaaaaatggttccggtgggaaaaactcgtgctttgtatgcgccccgacacccgttttccgaatgggtgacgtgcgacaacgaaattgcgcgaaaccaccccaaacatgagttttggacctaaagtagtggattgggcatgttcgttgtgaaaaacgaaaaaatggttccggtggcaaaaactcgtgcttttgtatgcacccgacacccgttttctggaatgggtgatgtgcgacaacgaaattgtgcgaaacctcccccaaacatgagttttgaacctaaagtagtggattaggcatgttcgttgcgaaaaacaaaaaaatggttccggtggcaaaaactcgtgcttttatgcaccccgatacccgttttcagaatgggagacgtgcgacattgaaattgtgtgaaaccaccccaaacatgagttttggacctaaagtagtggattgggcatgttcgttgcgaaaaacgaagaaatggttccggtggcaaaaactcgtgctttgtatgcaccccgacacccgttttcagaatgggtgacgcgcggcaacgaaattgcgcgaaaccaccccaaacatgagttttggacctaaagtagtggattaggcatgttcgttgcgaaaaacaaagaaatggtttcggtcgcaaaaactcgtgctttgtatgcacctgacacccgttttcggaatggctaacgtgcgacaacgaaattgtgcgaaaccaccccaaacatgagttttggacatg

SEQ ID NO: 798 - DNA, 4061 bp, Zea mays
  misc_feature (0)...(0): Zea mays BAC clone full insert sequence contig bacm.pk119.a23.fis35
aaacaccaaactccgcaggtaggtcgagggtataagcattatcattaatcttggttagtatcttaaaaggaccagcagcacgaggcatcaatttagaacggcgcaaagtaggaaaacgatcctttctcaaatgcaaccaaaccatatcaccaggttcaaaagtaacatgttttcttcctttactaccagcaacctgattttttgtattagtaccagcaatgttctgtttcgtttgttcatgtatggtaatcatttgttcaacatgtgcagaagcatctacatgtggggcgttcgcagcactaagtgaaatcaaatcaataggtgccctaggaatataaccataaacaatctggaaagggcatatctttgtagaagaatgcgtggcatgattgtaagcaaattcaacatgaggcaagcaatcctcccaacgtctcaaattcttgtctaaaacagccctaagcatggtagataaagttctatttactacctcagtttgtccatcagtctgagggtgacaagtagtgctaaacaacaatttagttcccaatttattccaaagagatctccaaaaatggcttagaaacttagcatcgcgatcagagactattgtttttggaataccatgtaaacgaataatttctctaaagaacaattcagcaacaatgctagcatcatcagttttatgacaaggtataaagtgagccattttagagaatctatcaacaaccacaaaaatactatccctccccttcttagttctaggcaagcccaaaacaaagtccatagagatatcaagccaaggagaagaagggacaggcaaaggcatatacaaaccatggttgttcaaccgtgacttagctttctgacaagtagtgcagcgtgcaacaaggcgctccacatcagcgcgcatccgaggccaaaagaagtgggcagccaacacctcatgtgtcttgtagacgccaaaatgccccatgagaccgcctccatgcgcttcctgtaacaacaaaagatgaaccgagctagctggaacacacagcttgttagcgcgaaacaggaacccatcctgtatgtgaaatttgccccatggtttcccattaatacaatggccgaaagcatctttaaaatcagcatcgtcaacatattgatccttcacagtgtccaaaccaaagattttaaaatctaactgtgacagcatggtatagcgacgagacaaagcatcagcaataacattgtccttcccgttcttgtgtttaataatgtaaggaaaggactcaatgaattctacccatttagcatgacgacggttcagatttgtttgggtacgaatatgttttaaagcctcatgatcagaatggattataaactcacgatgccaaagatagtgctgccatgtatgcaaagtgcgcactaaagcgtaaagctccttatcataagtagaatatttcagaatagcaccgcttaatttttcactaaaataagcaactggttttccttcttgtaacaaaacagcacctagcccaataccgctagcatcgcattcaagctcaaacactttattaaaatcaggcaattgcaataggggagcttgggttaacttatctttcaaagtgctgaacgctacctcctgcgaatcactccaagcaaacggcacatctttctttgtaagctcatgtagaggcgctgcaatggagctaaaatcacgaacaaatctgcggtagaaaccggcaagtccaagaaagctccgaatttgtgtgaccgtcgtcggtgtaggccactcccgaatggcagcaatcttgctgctatccacctcaatgccctgcggagtaaccacataaccaagaaacgagacacgttgcgtgcaaaatgtgcacttttccatgttaccaaacaagcgagcagcacgcaaagcgtcaaaaacagcacgcaaatgttctaaatgctcctctatagacttgctgtaaataaggatatcatcgaaataaacaacaacaaacaaacctatgaaggcccgtagaacttcgttcattaaacgcaaaaaggtgctgggagcattagtcaatccaaatggcataaccaaccattcatataaaccaaatttcgttttaaaagccgttttccattcatcaccgagtttcattctaatctgatggtaaccgctacgcaaatcaaccttagagaaaataacggcaccactaagctcatctagcatatcatcaatgcgtggaataggatatcgataacgaactgtgatgttattaatagcacgacaatctacgcacatacgccatgacccatctttctttgggacgagtaaaacaggaaccgagcaagggctaagagactcacgaatgtaacccttatcaagtagcgtctgcacctggcgctggatctcctttgtctcatctggatttgtacggtacggggcgcggttcggaagagaagcgccggggatgagatcgatctgatgctcaatgccacggaggggaggaagacccggtggtaagtccgtaggataaacatcagcatactcctgcaaaaggttaacaacagcagggggtatatccaaagacggtgcatcatcaagcggaacaagcattcgcgagcatacaagtgcataacagggcatatgagcttcatggagatcatcaaaatcagcacgtgtagcaagtaaaacaggagagtgcaacttgatttcagatttaataggtgcggctgatgtcgatttgacttgttgtgcagttttagcagccctagtaagatcatctttcaaaatttggtcaggggtcattggatgtataattattttctggcctttaaacatgaaagaataatgatttgaacgaccatgatgtaaactatcagtatcatattgccaaggtcgacctaataacaaagagcatgcttccataggaataacatcgcaatcagcataatcagaataagaaccgagcgaaaaggggacacgtaccgaacgtgttacctttattttaccaccatcattaagccattgaatgtgatacggatgtggatgtgtgcgagtgggcaaggataatttctctaccaacgctgtacttgccaaattgttgcagctgccactgtcgatgatgatgcgaatcgaccgttcgtgcacgacgcccttggtatggaatagagtgtgtcgctgatttttttcggcctgggcaacctgtgtgctgagaacacgctgcacaacaagactctcatacctatcggcgtcgataggatcaacgtggacttcctcattttctgcatggttagtggcaatcatagcatgactagtttcctcagaatcactggctgaagagtactcaccattgtcacgtataagcaaggtacacttgtttgggcagtcccgaatcatatgcccaaaccctctacaacgatggcactgaatatcccgtgtacgtcctgtggaagaagcggcgcctttggcaggggcgccactggcttggtcgtccctgtgcgcgatgtagtgcaaggcgtagaaggtgcagggctggaaggagttgagctgtgtgttggatcccgacctgcaagagagttagtatatgtctttgatcgtcgtccctgcacttcacgttcagctttgcaagcatattcaaacaatgtggttatatcaaaataatccttataatcaagtatatcctgaatttccctgttcaaaccaccacgaaaacgcgccatagcagcgtcatccgactcaactaaaccacaacgaagcatacccttttgtaactcctggtaataatcctcaacagactgtgaaccttgttgaaaacgctgcattttgttaagcaaatcacgagcataataggaaggaacaaatctgtggcgcatggcagtttttaattgggtccaagtaatgacactgttaatgggaagtttttgtttatactcacgccaccaaattaaagcaaaatcagtaaattcactaatggcagccttcacttggctattagcaggaatatcatggcatgaaaatttctgttctacctctaattcccaatcaagatatgcagcaggatcatatttaccattaaaag

SEQ ID NO: 799 - DNA, 4921 bp, Zea mays
  misc_feature (0)...(0): Zea mays BAC clone full insert sequence contig bacm.pk119.a23.fis36
cgaaaaacgaaaaatggttccggtggcaaaaactcgtgctttgtatgcaccccgaaacccgttttcggaatgggtgacgtgcggcaacgaaattgtgtgaaaccacccaaacatgagttttggacctaaagtagtggattgggcatgttcgttgcgaaaaacgaagaaatggttccggtggcaaaaactcgtgcttttatgcaccccgatacccgttttcacaatgggtgacgtgcgacaacgaaattgcgagaaaccacctcaaacatgagttttggacctaaagtagtggattgggcatgttcgttgcgaaaaaagaagaaatggttctgctggcaaaaacttgtgcttcgtatgcaccccgacacccgttttcggaatgggtgacgtgcggcaacgaaattgcgcgaaaccaccccaaacatgagttttggacctaaagtagtggattgggcatgttcgttgagaaaaacaaagaaatggtaccggtggcaaaaactcgtgctttgtatgcacccgacacccgttttcggaatgggtgacgtgcgacaacaaaattgtgcgaaaccaccccaaacatgagttttggacctaaagtagtggattgggcatgttcgttgcgaaaaacgaagaaatggttccggtggcaaaaactcgtgctttgtatgcaccccgacacccgttttcggaatgggtgacgtgctacaacgaaattgcgcgaaacctccccaaacattagttttggacctaaagtagtggatcaggcatgttcgttgcgaaaaacgaagaaatggttctggtggcaaaaactcgtgctttgtatgcacccgacacccgtttccggaaagggtgatgtgcgacaacgaaattgtgcgaaacctccccaaacatgagttttgaacctaaagtagtggattaggcatgttcgttgcgaaaaacgaagaaatggttccggtggcaaaaactcgtgcttttatgcaccccgatacccgttttcagaatgggagacgtgcgacattgaaattgtgtgaaacgaccccaaacatgagttttggacctaaagtagtggattgggcatgttcgttgcgaaaaacgaagaaatggttccggtggcaaaaactcgtgctttgtatgcaccccgacacccgttttcagaatgggtgacgcgcggcaacgaaattgcgcgaaaccaccccaaacatgagttttggacctaaagtagtggattaggcatgttcgttgcgaaaaacaaagaaatggtttcggtcgcaaaaactcgtgctttgtatgcacctgacacccgttttcggaatggctaacgtgcgacaacgaaattgtgcgaaaccaccccaaacatgagttttggacctaaagtagtggattgggcatgttcgttgcgaaaaacgaagaaatggttccagtggcaaaaactcgtgcttttatgcaccccgatacccgttttcagaatgggtgacatgcgacaacgaaattgcgcgaaaccaacccaaacatgagttttggacctaaagttgtggattgggcatgttcgttgcgaaaaacgaagaaatggttacggtggcaaaaactcttgctttgtatgcacccgacacccgttttcggaatgggtgacgtgcgacaacgaaattgcgcgaaaccaccccaaacatgcgttttggacctaaagtagtggattgggcatgttcgttgcgaaaaacgaagaaatggttccggtggcaaaaactcgtgctttgtatgcaccccgacacccgttttcggaatgggtgacgtgcgacaacgaaattgcgcgaaaccaccccaaacatgagttttggacctaaagtagtggattgggcatgttcgttgcgaaaaacgaagaaatggttctggtggcaaaaactcgtgctttgtatgcacccgacacccgttttcggaatgggtgacgtgcgacaacgaaattgcgcgaaaccaccccaaacatgagttttggacctagagtagtggattgggcatgttcgttgtgaaaaacgaagaaatggttccggtggcaaaaactcgtgctttgtatgcaccccgacaaccgttttcagaatggttgacgtgctacaacgaaattgcgcgaaaccaccccaaacatgagttttggacctaaagtagtggattgggcatgttcgtttcgaaaaacgaaaaaatggttccggtggcaaaaactcgtgctttgtatgcacccgacacccgttttcggaatgggtgacgtgcggcaacgaaattgtgcgaaaccacccaaacatgagttttggacctaaagtagtggattgggcatgttcgttgcgaaaaacgaagaaatggttccggtggcaaaaactcgtgcttttatgcaccctgatacccgttttcagaatgggtgacgtgcgacaacgaaattgcgagaaaccacctcaaacatgagttttggacctaaagtagtggattgggcatgttcgttgcgcaaaacgaagaaatagttttggtggcaaaaactcgtgctttgtatgcaccccgacacccgttttcggaatgggtgacgtgcgacaacgaaattgcgcaaaaccaccccaaacatgagttttggacctaaagtagtggattgggcatgttcgttgagaaaaacgaagaaatggttccagtggcaaaaactcgtgctttgtatgcacccgacacccgttttcggaatgggtgacgtgcgacaataaaattgtgtgaaaccaccccaaacatgagttttgaacctaaagtagtggattgggcatgttcgttgcgaaaaacgaagaaatggttccggtggcaaaaactcgtgctttgtatgcaccccgacacccgttttttggaatgggtgacgtgctacaacgaaattgcgcgaaacctccccaaacatgagttttggacctaaagtagtggattaggcatgttcagtgcgaaaaacgaagaaatggttctggtggcaaaaactcgtgctttgtatgcacccgacacccgttttcggaatgggtgatgtgcgacaacgaaattgtgcgaaacctccccaaacatgagttttgaacctaaagtagtggattaggcatgttcgttgcgaaaaacgaagaaatggttccggtggcaaaaactcgtgcttttatgcaccccgatacccgttttcagaatgggagacgtgcgacatcgaaattgtgtgaaaccacaccaaacatgagttttggacctaaagtagtggattgggcatgttcgttgcgaaaagcgaagaaatggttccggtggcaaaaactcgtgctttgtatgcaccccgacaaccgttttcagaatgggtgacgtgcggcaacgaaattgcgcgaaaccaccccaaacatgagttttggacctaaagtagtgcattgggcatgtttgttgtgaaaaacgaagaaatggttccgatggcaaaaactcgtgctttgtatggaccccgacacccgttttcagaatgggagacgtgcgacatcgaaattgtgtgaaaccaccccaaacatgagttttggacctaaagtagtggattgggcatgttcgttgcgaaaaatgaagaaatggttccggtggcaaaaactcgtgctttgtatgcaccccgacacccgttttcagaatgggtgacgcgcgacaacgaaattgcgcgaaaccaccccaaacatgagttttggacctaaagtagtggattaggcatgttcgttgcgaaaaacgaagaaatggttccggtggcaaaaactcgtgctttgtatgcacccgacacccgttttcggaatgggtgacgtgcgactacgaaattgtgcgaaaccaccccaaacatgagttttggacctaaagtagtggattgggcatgttcgttgcgaaaaacgaagaaatggttccggtggcaaaaactcgtgctttgtacgcgccccaatacccgttttcggaatgggtgacgtgcgacaataaaattgcgcgaaaccaccccaaacatgagttttggacctaaagtagtggattgggcatgttcgttgtgaaaaacgaagaaatggttccggtggcaaaaactcgtgctttgtatgcacccgacacccgttttcggaatgggtgacgtgcgacaacgaaattgcgcgaaaccaccccaaacatgagttttggacctaaagtagtggattgggcatgttcgttgtgaaaaacgaagaaatggttacggtggcaaaaactcgtcctttgtatgcaccccgacaaccgttttcagaatggttgacgtgcgacaacgaaattgcgcgaaaccaccccaaacatgagttttggacctaaagtagtggattgggcatctttgttgcgaaaaacgaaaaaatggttccggtggcaaaaactcgtgttttgtatgcacccgacacccgttttcggaatgggtgacgtgcgacaaggaaattgcgagaaaccaccccaaacatgagttttggacctaaagtagtggattgggcatgttcgttgcgaaaaacgaagaaatggttccggtggcaaaaactcgtgctttgtatgcaccccgacacctgttttcgaaatgggtgacgtgcaacaacaaaattgcgagaaaccaccccaaacttgagttttggacctaaagtagtggattgggcatgttcgttgcgaaaaacgaagaaatggttcgggtggcaaaaactcgtgtttttatgcacccgacacccgttttcggaatgggtgacgtgcggcaacgaaattgcgcgaaaccaccccaaacatgagttttgtacctaaagtagtggattgggcatgttcgttgcgaaaaacgaagaaatggttccggtggcaaaaactcgtgctttgtactgataaccgttttcagaatgggtgacgcgcggcaacgaaattgcgcgaaaccacccaa

SEQ ID NO: 800 - DNA, 5596 bp, Zea mays
  misc_feature (0)...(0): Zea mays BAC clone full insert sequence contig bacm.pk119.a23.fis37
atggtgcttgctgcagttacgaattcctcggactggtggagtcaagaagttctctcgacagtttctggacgccctcatttggtatctctaattgattctttctcccaccaagaagtagacgaagagtgctttccatcaagtgcttatttgccttcattggccttgggagttgaaagatatgacctcttcaacttgcacttgctgcagttacgaaatcccttcaagtggagcagcttttattgccttgttgccttctcaaattctagatggtttacctcccaaacaccttagcataataaagtaatcacaaggtattaatacctcatttaaggaatgattagcttcaacaacaaggaacgagttcacctgataattaaatttacgtgcacggactcgtttcactggtccatgattaaatggtgaagggggtcgctggtgtggttgtattgatggcagtgatgtcctcatcatcctccccttcttttaatagagtcgtcctcgactctagtgtgtgctcctcacccaagtatatctttaaatttgatgatgtgcttgcttggttggaaatgttggaaatatcattacttggtccccaatcaacttctttgttcctcaatgtctttgtagcaggagccattaacatggccatatctgtgcgggttatgttctcatcattctccccttcttgacagcaaaccgtcctcggttttgcatcatgattgatgttgatgactaagcttttatcaatgtctttcaaatataaacttgaaacttctactaaagtacatggaaacaagagattcttttcttcttgagaacataccaatatcttatttgcaaaaagtgaagaaacaacatatctagatgaaatagaaattctatgcacaagaaattgtcctatgttgttgtacttgccagcaatgtaaaatataacatgagaaggacaaggtatagttgatctagcaaataaaatattttccaaattaccgagctcaaaaagatcatcaaactcaatatatccccaagtatttaaagaagagagcaaatttatttcttcagtttcgtttgcaatacaaattacatgttcctttttagccaaaatgtttggttcaataacagatgtaacatgatcatttactagttgttgccttagtacatgtgaatcattataccacaaatcttcactatcacaagtgtcagcaatcaattcttcttgtgatgatggaaaaacaatagctggtttcattattttgtgttcttgatcagcatgtagagcagatgcaaaagaggaactatggctcacatgttcagtgcttgtataattatataatagaatctcattttcagctttacatgcaagcaaaaacaagtgagaaatgtgtttgtatgcttcatgcatgactatagtctgaatttcagaattgagtcctttcatgaacctagtcattacatcttccatgcattcatctaaacgagcaaacatggtacaaattttaaaatcataataataatctatcacagtcctagcaccctgctttaaggtgtctaatttagaaagcaaatgatcagaatagtatgcaggaatgaatgcatctctaaaatgaagtttgaagtcttcccaagattgtggaactttgttgtgcctacaaatgtgtttccattccatcaatgcgtgctcagttaacaaattagaggcaatataaatcttttgtttttgagatagatcatgcttatcaaattcattatctacctttagctcccaatcaatgtatgcatgaggatcgaatttaccggcatatgaaggtaagtgtcgaatgatgccttgaatataatgttcagttggctcaaaaatctccatatcacctgccatgtttagtaaagacaagaaaacaataaaaatatctttgatcctataaactactaggatttattgttgtaatctctcattctcaaactggttaagcaagttcttacaaattctcaccacgcaatacaggaggtgccagcaaacagcaagaataacaacaacggtggcagctagcacaacctggtggtgttgtagaaaaatttgtggatttataggtagctgcaatttcaatagttccaaggaatagctagtaccacgttagccacaacaagttgaataaacgttctacaatggtgttgtgctggtcctagtccaaaccgtaatagagacgcgagccgttacacaaatagtatcaccaaaaggtcagaacagcaatcggatttttgaaactataaaaagaaggcacacaaactgccttttgttttgttgcacttacaaattttatctaccaaaattcagaactggttttttctctctctcttttttgcacgtgtctttttttattttgctgattagtgcggctttttttatgcactcgccttttgctttctcttctttttggttgaattgcagcaagaggtctaaactggtgattgtaacaaggtggcgcgaactcgaaactctagcggtaagaaaactttagaccagcaactcgacccaaatgcagcaaccgtgaattcaacaagtcgaaaactaagtagtaaagcaaaggctcaaactgtttttaggtgaatttctgctctaaatatatctttgggcaaaagtggactgtaggtaaataaaacaaggaagattgagatctctcaccgagcaacctgaaatttgataccacttgataacccaacgggtagaagggtgcccgatctttcgatgagagatgatggaggtggaaaacttgttggagaacgaccttggctgcccgactaccacaaccaagatggtgtggcgccttgagcgacaggtacaccgtctcctggtaactacgatttggggtggaggtcgacgttgtgctatccgactacaacaaccacaagggtgctgcgccttagcgatagttacaccggctcctgttgttgttgctcttgccgtgccaagaacaaccttgaacctgcaagcaatcgagaacaagcaagaacaagataaaaagcagacgctcacggatctgatagagttggggttctgtttcaagtatccgggtggtctagccgacacacgcgtttacaaggaagtagcaaaggctaaacttacatcaaacaaaaacccaagttctttggtggctgctagttgcttaaatagaggaatagaaagaagttctggtggagaacgaagctctctcgacagtttctggacgtgtcgtttggtttctcccattgattcttcagccgccagaaagtagacgaagagagctttccaacaagtacttatttgactaaacaatcttgggagatgaaagatatgctccatttaatatggtgcttgctgcagttacgaattccctcggactggtggagtcaagaagttctctcgacagtttctggacgcctcatttggtatctctaattgattctttctccaccaagaagtagacgaagagtgctttccatcaaatgcttatttgccttcattggccttgggagttgaaagatatggcctcttcaacttgcacttgctgcagttacgaaatcccttcaagtggagcagcttttattgccttgttgccttctcaaattctagatggtttacctcccaaacaccttagcataataaagtaatcacaaggtattaatacctcatttaaggaatgattagcttcaacaacaaggaacgagttcacctgataattaaatttacgtgcacggactcgtttcactggtccatgattaaatggtgaagggggtcgctggtgtggttgtattgatggcagtgatgtcctcatcatcctccccttcttttaatagagtcgtcctcgactctagtgtgtgctcctcacccaagtatatctttaaatttgatgatgtgcttgcttggttggaaatgttggaaatatcattacttggtccccaatcaacttctttgttcctcaatgtctttgtagcaggagccattaacatggccatatctgtgcgggttatgttctcatcactaaagtagtggattgggcatattcgttgcgaaaaacgaagagatgattccggtggcaaaaactcgtgctttgtatgcacccgacacccgttttcggaatgggtgacgtgctacaacgaaattgcgcgaaaccaccccaaacatgagttttggacctaaagtagtggattgggcatgttcgtcgcaaaaacgaagaaatggttccagtggcaaaaactcgtgctttgtatgcaccccgacaaccgttttcagaatgggtgacgcgcgacaacgaaattgcgcgaaaccaccccaaacatgagttttggacctaaagtagtggattgggcatgttcgttgcgaaaaacgaaaaaatggttccggtggtaaaaactcgtgctttgtatgcacccgacacccgttttcggaatgggtgacgtgcgacaacgaaattgtgtgaaaccaccccaaacatgagttttggacctaaagtagtggattggacatgttcgttgtgaaaaacgaagaaatggttccggtggcaaaaactcgtgcttttatgcacctcgatacccgttttcagaatgggtgacgtgcgacaacgaaattgcgcgaaaccacctcaaacatgagttttggacccaaagtagtggattgggcatgtttgtagcgaaaaacaaagaaatggttccggtggcaaaaactcgtgctttgtatgcaccccgacacccgttttctgaatgggtgacgtgtgacaacgaaattgtgcgaaaccacccaaacatgagttttggacctaaagtagtggattgggcatgttcgttgcgaaaaacaaagaaatggttccggtggcaaaaactcgtgctttgtatggacccgacacccgttttcggaatgggcgacgtgcgacaaaaattgtgcgaaaccaccccaaacatgagttttggacctaaatagtggattgggcatgttcgttgcgaaaaacgaagaaatggttccggtggcaaaaactcgtgcttttatgcaccccgatacccgttttcagaatgggtgacgtgcgacaacgaaattgcgcgaaaccacctcaaacatgagttttggacctaaagtagtggattgggcatttttgttgcgaaaaacaaagaaatggttccgctggcaaaaactcgtgctttgtatgcaccccgacacccgttttcggaatgggtgacgtgcgactacgaaattgtgcgaaaccaccccaaacatgagttttggacctaaagtagtggattgggcatgttcgttgcgaaaaacgaagaaatggttccggtggcaaaaactcgtgctttgtatgcacccgacacccgttttcggaatgggtgacgtgcgacaacgaaattgcgcgaaaccaccccaaacatgagttttggacctaaagtagtggattgggcatgtttgttgcgaaaacgaagaaatggttccggtggcaaaaactcgtgctttgtatgcaccccgacaaccgttttcagaatggttgacttgcgacaacgaaattacgcgaaaccaccccaaacatgagttttggacataaagtagtggattgggcaatttcgttgcgaaaaacga

SEQ ID NO: 801 - DNA, 2660 bp, Zea mays
  misc_feature (0)...(0): Zea mays BAC clone full insert sequence contig bacm.pk119.a23.fis38
ccctaaaccctaaaccctaaaccctaaaccctaaaccctaaaccctaaaccctaaaccctaaaccctaaaccctaaaccctaaaccctaaaccctaaaccctaaaccctaaaccctaaaccctaaaccctaaaccctaaaccctaaaccctaaaccctaaaccctaaaccctaaaccctaagggcgaattcgatatcaagctggccgctcgagctataactatgactctcttaaggtagccaaatgctgcagactagtaattacacataacacacaactttgatgcccacattatagtgattagcatgtcactatgtgtgcatccttttatttcatacattaattaagttggccaatccagaagatggacaagtctaggttgcggccggccgctacaggaacaggtggtggcggccctcggtgcgctcgtactgctccacgatggtgtagtcctcgttgtgggaggtgatgtccagcttggcgtccacgtagtagtagccgggcagctgcacgggcttcttggccatgtagatggacttgaactccaccaggtagtggccgccgtccttcagcttcagggccttgtgggtctcgcccttcagcacgccgtcgcgggggtacaggcgctcggtggaggcctcccagcccatggtcttcttctgcatcacggggccgtcggaggggaagttcacgccgatgaacttcaccttgtagatgaagcagccgtcctgcagggaggagtcctgggtcacggtcgccacgccgccgtcctcgaagttcatcacgcgctcccacttgaagccctcggggaaggacagcttcttgtagtcggggatgtcggcggggtgcttcacgtacaccttggagccgtactggaactggggggacaggatgtcccaggcgaagggcagggggccgcccttggtcaccttcagcttcacggtgttgtggccctcgtaggggcggccctcgccctcgccctcgatctcgaactcgtggccgttcacggtgccctccatgcgcaccttgaagcgcatgaactcggtgatgacgttctcggaggaggccatggtggcgaccggtggatccatctgcgtcaccgggcgcaccgggcgcggcggggccggcagctcgaagtcgcgctgccagaagccgacgtcgtgccagccgccgtgcttgtagccggcggcgcggagggtgccgcgggcggtgtagccgagggcctcgtggaggcgcacggacgggtcgttcgggaggccgatcacggccaccacggacttgaagccctgggcctccatgctcttgaggaggtgggtgtagagggtggagccgaggccgaggcgctggtggcggtgggacacgtacacggtggactccacggtccagtcgtaggcgttgcgggccttccacgggccggcgtaggcgatgccggccaccacgccctccacctcggccacgagccacgggtagcggtcctggaggcgctccaggtcgtcgatccactcctgcggggtctgcggctcggtgcggaagttcacggtggaggtctcgatgtagtggttcacgatgtcgcacacggcggccatgtcggcggcggtggccgggcggatctcgacggggcggcgctcgggggacatggtgtcgtgtggatccccggcggtcgacctgcagaagtaacaccaaacaacagggtgagcatcgacaaaagaaacagtaccaagcaaataaatagcgtatgaaggcagggctaaaaaaatccacatatagctgctgcatatgccatcatccaagtatatcaagatcaaaataattataaaacatacttgtttattataatagataggtactcaaggttagagcatatgaatagatgctgcatatgccatcatgtatatgcatcagtaaaacccacatcaacatgtatacctatcctagatcgatatttccatccatcttaaactcgtaactatgaagatgtatgacacacacatacagttccaaaattaataaatacaccaggtagtttgaaacagtattctactccgatctagaacgaatgaacgaccgcccaaccacaccacatcatcacaaccaagcgaacaaaaagcatctctgtatatgcatcagtaaaacccgcatcaacatgtatacctatcctagatcgatatttccatccatcatcttcaattcgtaactatgaatatgtatggcacacacatacagatccaaaattaataaatccaccaggtagtttgaaacagaattctactccgatctagaacgaccgcccaaccagaccacatcatcacaaccaagacaaaaaaaagcatgaaaagatgacccgacaaacaagtgcacggcatatattgaaataaaggaaaagggcaaaccaaaccctatgcaacgaaacaaaaaaaatcatgaaatcgatcccgtctgcggaacggctagagccatcccaggattccccaaagagaaacactggcaagttagcaatcagaacgtgtctgacgtacaggtcgcatccgtgtacgaacgctagcagcacggatctaacacaaacacggatctaacacaaacatgaacagaagtagaactaccgggccctaaccatggaccggaacgccgatctagagaaggtagagagggggggggggggg

SEQ ID NO: 802 - DNA, 8067 bp, Zea mays
  misc_feature (0)...(0): Zea mays BAC clone full insert sequence contig bacm.pk119.a23.fis39
ctcactactttgggtccaaaactcatgtttgaggtggtttcccgcaatttcgttgtcgcacgtcacccattctgaaaacgggtatcggggtgcataaaagcacgagtttttgccaccggaaccatttcttcgtttttcacaacgaacatgtccaatccactactttaggtccaaaactcatgtttggggtggtttctcacaatttcgttgtcgcacgtcacccattccgaaaacgggtgtcgggtgcacacaaagcacgagtttttaccaccggaaccattttttcgtttttcgcaacgaacatgcccaatccactactttaggtccaaaactcatgtttggggtggtttcgcgcaatttcgttgccgcacgtcacccattctgaaaacggttgtcggggtgcatacaaagcacgagtttttgccaccggaaccatttcttcgtttttcgcaacgaacatgcccaatccactactttaggtccaaaactcatgtttggggtggtttcgcgcaatttcgttgtagcacgtcacccattccgaaaacgggtgtcgggtgcatacaaagcacgagtttttgccaccggaatcatctattcgtttttcgcaacgaacatgcccaatccactactttaggtccaaaactcatgtttggggtggtttcgcgcaatttcgttgtcgcacgtcacccattccgaaaacgggtgtcgggtgcatacaaagcacgagtttttgccaccaaaacaatttctttgtttgtcgcaacgaacatgcccaatccactactttaggtcaaaaactcatgtttggggtggtttcacgcaatttcgttgccgcacgtcacccattctgaaaacgggtgtcggggtgcatacaaagcacgagtttttgccaccggaaccatttcttcatttttcgcaacaaacatgcccaatccactactttagatccaaaactcatgtttggggtggtttcgcgcaatttcgttgtcacacgtcgcccgttccgaaaacgggtgtcgggtgcatacaaagcacgagtttttgccaccggaaccatttcttcgttttcgcaacaaacatgcccaatccactactttaggtccaaaactcatgtttggggtggtttcgcgcaatttcgttgtcgcacgtcacccattccgaaaacgggtgtcgggtgcatacaaagcacgagtttttgccaccggaaccatttcttcgtttttcgcaacgaacatgcccaatccactactttaggtccaaaactcatgtttggggtggtttcgcacaatttcgtagtcgcacgtcacccattccgaaaacgggtgtcggggtgcatacaaagtacgagtttttgccagcggaaccatttctttgtttttcgcaacaaaaatgcccaatccactactttaggtccaaaactcatgtttgaggtggtttcgcgcaatttcgttgtcgcacgtcacccattctgaaaacgggtatcggggtgcataaaagcacgagtttttgccaccggaaccatttcttcgtttttcgcaacgaacatgcccaatccactatttaggtccaaaactcatgtttggggtggtttcgcacaatttttgtcgcacgtcacccattccgaaaacgggtgtcgggtccatacaaagcacgagtttttgccaccggaaccatttctttgtttttcgcaacgaacatgcccaatccactactttaggtccaaaactcatgttttgggtggtttcgcgcaatttcgttgccgcgcgtcacccattctgaaaacggttatcagtacaaagcacgagtttttgccaccggaaccatttcttcgtttttcgcaacgaacatgcccaatccactactttaggtacaaaactcatgtttggggtggtttcgcgcaatttcgttgccgcacgtcacccattccgaaaacgggtgtcgggtgcataaaagcacgagtttttgccaccggaaccatttcttcgtttttcgcaacgaacatgcccaatccactactttaggtccaaaactcatgtttggggtggtttctcgcaattttgttgttgcacgtcacccatttcgaaaacaggtgtcgggctgcatacaaagcacgagtttttgccaccggaaccatttcttcgtttttcgcaacgaacatgcccaatccactactttaggtccaaaactcatgtttggggtggtttctcgcaatttcgttgtcgcacgtcacccattccgagaacgggtgtcgggtgcatacaaagcacgagtttttgccacggaaccatttcttcgtttttcgcaacaaacatgcccaatccactactttagctccaaaactcatgtttggggtggtttcgcgcaatttcgttgccgcacgtcacccattccgaaaacgggtgtcggggtgcatacaaagcacgacattttgccaccggaaccatttcttcgtttttcgcaacgaatatgcccaatccactactttaggtccaaaactcatgtttgaggtggtttcgcgcaatttcgttgtcgcacgtcacccattccgaaaactagtgttggggtgcatacaaagcacgagtttttgccaccggaaccatttcttcgtttttcgcaacgaacatgcccaatccactactttaggtccaaaactcatgtttggggtggtttcgcgcaatttcgttgccgcacgtcacccattctaaaaacggttgtcagggtgcatacaaagcacgcgtttttgccaccgaaaccatttcttcgtttttcgcaacgaacatgcccactccactactttaggtccaaaactcatgtttgaggtagttttgcgcaatttcgttgccgcacgtcacccattctgaaaacggttgtcggggtcatacaaagcacaagtttttgccaccggaaccatttcttcgtttttggcaacgaacatgcccaatccactactttaggtccaaaactcatgtttggggtggtttcgcacaatttcgttttcgcacgtcacccattccgaaaacaggtgtggggtgcatacaaagcacgagtttttgccaccagaaccatttctttgtttgtcgcaacgaacatgcccaatccactactttaggtcaaaaactcatgtttggggtggtttcacgcaatttcgttatcgcacgtcacacattctgaaatcgggtgtcgggtgcatacaaagcacgagtttttgctaccggaaccgtttcttcgtttttcgcaacgaacaggcccaatccactactttaggtccaaaactcatgtttggggtggtttctcgcaatttcgttatcgcacgtcacacattacgaaaacgggtgtcgggtgcatacaaagcacgagtttttgccgccggaaccatttcttcgtttttggcaacgaacatgcccaatccactaatttaggtccaaaactcatgtttggggtggtttcgcgcaatttcgttgtcgcacgtcacccattccgaaaacgggtgtcgggtgcatagaaagcacgagtttttgccaccggaaccgtttcattgtttttcgcaacgaatatacccaatccactactttaggtccaaaactcatgtttgaggtggtttcgcgcaatttcgttgtcgcacgtcacccattccgaaaactagtgtcggggtgcatacaaagcacgagtttttgccaccggaaccatttcttcgtttttcgcaacgaacatgcccaatccactactttaggtccaaaactcatgtttggggtggtttcgcgcaatttcgttgtcgtacgtcacccattccgaaaacaggtgtcgggtgcatacaaagcacgagtttttgccaccggaaccatttcttcgtttttcgcaacaaacatgcccaatccactactttaggtacaaaactcatgtttggggtggtttcgcgcaatttcgttgccgcacgtcacccattctgaaaacggttgtcggggtgcaataaaagcacgagtttttgccaccggaaccatttcttcgttttccgcaacgaacatgcccaatccactactttaggtccaaaactcatgtttggggtggtttcgcacaatttcgttgtcgcacgtcacccattccgaaaacgggtgtcggggtgcatacaaagcacgagtttttgccagcggaaccatttctttgtttttcgcaacaaaaatgcccaatccactactttaggtccaaaactcatgtttcgggtggtttcgcacaatttcgttgtcgcacgtcacccattctgaaaacgggtatcggggtgcataaaaaagcacgagtttttgccatcggaaccatttcttcttttttcgcaacgaaaatgcccaatccactactttaggtccaaaactcatgtttcgggtggtttcacacaatttcgttgtcgcacgtcacccattccgaaaacgggtgtcgggtgcatacaaagcacgagtttttgccaccggaaccattttttcttttttcgcaacgaacatgcccaatccacaactttaggtccaaaactcatgtttgaggtggtttcgcgcaatttcgtttccgcacgtctcccattttgaaaacgggtgtgggggagcatacaaagcacgagtttttgccacctgtatcatttcttcgtttttcgcaacgcacatgcccaatccactactttagatccaaaactcatgtttgaggtggttacgcgcaatttcgttgtcgcacgtcacccattctagaaacgggtatgcataaaagcacgagtttttgccaccggaaccatttcttcgtttttcgcaacgaacatgcccaatccactactttaggtccaaaactcatgtttgtggtggtttcgcacaatttcgttgtcgcacgtcacccattccgaaaacaggtgtcgggtgcatacaaagcacgagtttttgccaccggaaccatttctttgtttttcgcaacgaacatgcccaatccactactttaggtctaaaactcatgtttggggtggtttcacgcaatttcgttgctgcacgtcacccattctgaaaacgggtgtcggggtgcatacagagcacgagtttttgccaccggaaccatttcttcgtttttcgcaacgaacatgcccaatccactactttaggtccaaaactcatgtttggggtggtttcgcgcaatttcgttgtcgcacgtcgcccgttccaaaaacgggtgttgggtgcatacaaagcacaagtttttgccaccggaaccatttcttcgtttttcgcaacgaacatgcccaatccactatttaggtccaaaactcatgtttggggtggtttcgcacaatttcgttgtcgcacgtcacccattccgaaaacgggtgtcgggtgcatacaaagcacgagtttttgccaccggaaccatttctttgtttttcgcaacgaacatgcccaatccactagtttaggaccaaaactcatgtttgggtggtttcgcacaatttcgttgccgcacttcacccattctgaaaacgggtgtgggggtgcatacaaagcacgagtttttgccaccggaaccatttcttcgtttttcgcaacgaacatgcccaatccactactttaggtccaaaactcatgtttggggtggtttcgcacaatttcgttgtcgcacatcacccattccgaaaataggtgtcgggtgcatacaaagcacgagtttttgccaccggaaccatttctttgtttttcgcaacgaacatgcccaatccactactttaggtctaaaactaatgtttggggtggtttcacgcaatttcgttgccgcacgtcacccattctgaaaacgggtgtcggggtgcatacaaagcacgagtttttgccaccggaaccatttcttcatctttcgcaacgaacatgcccaatccactactttagatccaaaactcatgtttggggtggtttcgcgcaatttcgttgtcgcacgtcgcccgttccgaaaacgggtgtcgggtgcatacaaagcacaagtttttgccaccggaaccatttcttcgttttttcgcaacgaacttgcccaatccagtactttatgtccaaaactcatgtttggggtggtttcgcgtaatttcgttgccacagttcaaccattctgaaaacggttgtcggggtgcatacaaagcacgagtttttccccccggaaccatttttttgttttcgcaatgaacatgcccaatccactactttaggtctaaaactcatgtttgggatggtttcgcgcaatttcgttgtcgcacgtcacccattccaaaaacgggtgttgggtgcatacaaagcacgagtttttgccaccggaaccattttttcatttttcgcaacgaacatgcccaatccactactttaggtccaaaactcatgtttggggtggtttcgcacaatttcgttgtcgcacgtcacccattccgaaaacgggtgtcggggtgcatacaaagcacgagtttttgccagcggaaccatttttttgtttttcgcaacaaaaatgcccaatccactactttaggtccaaaactcatgtttggggtggtttcgcgcaatttcgttgtcgcacgccacccattctgaaaacgggtatcggggtgcataaaagcacgagtttttgccaccggaaccatttcttcgtttttcgcaacgaacatgcccaatccactatttaggtccaaaactcatgtttggggtggtttcgcacaatttttgtcgcacgtcgcccattccgaaaacaggtgtcgggtccagacaaagcacgagtttttgccaccggaaccatttctttgtttttcgcaacgaacatgcccaatccactactttaggtccaaaactcatgtttgggtggtttcgcacaatttcgttgtcgcacgtcacccattccgaaaacgggtgtcggggtgcatacaaagcacgagtttttgccaccggaaccatttctttgtttttcgctacaaacatgcccaatccactactttgggtccaaaactcatgtttgaggtggtttcgcgcaatttcgttgtcgcacgtcacccattctgaaaacgggtatcagggtgcataaaagcacgagtttttgccaccggaaccatttcttcgtttttcgcaacgaacatgcccaatccactactttaggtccaaaactcatgtttggggtggtttcacacaatttcgttgtcacaccacacctcactcaatcccaaaacgggtgacgggtggatacaaagcattattttttaccaccggaaccattttttcgtttttcgcaacgaacatgcccaatccactactttaggtccaaaactcatgtttggggtggtttcgcgcaatttcgttgccgcacgtcacccattctgaaaacggttgtcggggtgcatacaaagcacgagtttttgccaccggaaccatttcttcgtttttcgcaacgaaaatgcccaatccactactttaggtccaaaactcttgtttggggtggtttcgcgcaatttcgttgtagcacgtcacccattccaaaaacgggtgtcgggggcaaacaaagcacgagtttttgccaccggaatcatttcttcgtttttcacaacgaaaatgcccaatccactcctttaggtccaaaactcatgtttggggtggtttcgcgcaaatttatttgtcgaacgtcccccattcggaaaacgggtgtcggggggcatacaaagcacgagtttttgccaccggaaccattttttcgtttttcgcaacgaacatgcccaatccactactttaggtccaaaacacatgtttggggtggtttcgcgcaatttcgttgtcgcacgtcacccattccgaaaacgggtgtcgggtgcatacaaagcacgagtttttgccaccgtaaccatttcttcgtttttcgcaacgaacatgcccaatccactactttaggtccaaaactcatgtttgggttggtttcgcgcaatttcgttgtcgcacgtcacccattctgaaaacgggtattggggtgcataaatgctcgagtttttgccactggaaccatttcttcgtttttcacaacgaacctcgctcatcg

SEQ ID NO: 803 - DNA, 6853 bp, Zea mays
  misc_feature (0)...(0): Zea mays BAC clone full insert sequence contig bacm.pk119.a23.fis40
aagtagtggattggggcatgtttgttgccaaaaaaagaagaaatgtgtttcggtgcaaaaaatcgtgctttgtatgcaccccgacaacccttttcggaatgggtgacgtgcggcaacgaaaatgcgcgaaaccacctccaacatgagttttggacctaaagtagtggagtgggcatgttcgttgcgaaaaacgaagaaatggtttccgtggcaaaaactcgtgctttgtatgccccccgacaaccgtttttggaatgggtgacgtgcggcaacgaaattgcgcgaaaccaccctaatcatgagttttggacctaaagtagtggattgggcatgttcgttgcgaaaaacgaagaaatggttccggtggcaaaaactcgtgctttgtatgcaccccgacactagttttcggaatgggtgacgtgcgacaacgaaattgcgcgaaaccacctcaaacatgagttttggacctaaagtagtggattgggcatattcgttgcgaaaaacgaagaaatggttccggtggcaaaaactcgtgctttgtatgcacccgacacccgttttcggaatgggtgacgtgcggcaacgaaattgcgggaaaccaccccaaacatgagttttggacctaaagtagtggattgggcctgttcgttgcgaaaaacgaagaaatggttccggtggcaaaaactcgtgctttgtatgcacccgacacccgatttcgaaatgtgtgacgtgcgataacgaaattgcgagaaaccaccccaaacatgagttttggacctaaagtggtggattgggcatgttcgttgtgaaaaacgaagaaatggtttcggtggcaaaaactcgtgctttgtatgcactccacacccgttttctgaatgggtgacgtgcgacaacgaaattgcgcgaaaccaccccaaacatgagttttggacctaaagtagtggattgggcatgttcgttgcgaaaaacgaaagaaatggttcctgtggcaaaaactcgtgctttgtatgcaccccgacacccgttttcggaatggttgacgtgcgacaacgaaattgcgcgaaacccccccaaacatgagttttggacctaaaatagtggattgggcatattcgttgcgaaaaacgaagaaacggttccggtggcaaaaactcatgctttgtatgcaccccgacacccgttttcggaatgggtgacgtgcgacaaagaaattgcgcgaaaccaccccaaacatgagttttggacctaaagtagtggattgggcatgttcgttgcggaaaacgaagaaatggttccggtggcaaaaactcgtgcttttattgcaccccgacaaccgttttcagaatgggtgacgtgcggcaacgaaattgcgcaaaaccaccccaaacatgagttttgtacctaaagtagtggattgggcatgtttgttgcgaaaaacgaagaaatggttccggtggcaaaaactcgtgctttgtatgcacccgacacctgttttcggaataggtgacgtacgacaacgaaattgcgcgaaaccaccccaaacatgagttttggacctaaagtagtggattgggcatgttcgttgcgaaaaacgaagaaatggttccggtggcaaaaactcgtgctttgtatgcaccccgacactagttttcggaatgggtgacgtgcgacaacgaaattgcgcgaaaccacctcaaacatgagttttggacctaaagtagtggattgggcatattcgttgcgaaaaacaatgaaacggttccggtggcaaaaactcgtgctttgtatgcacccgacacccgttttcggaatgggtgacgtgcgacaacgaaattacgcgaaaccaccccaaacatgagttttggacctaaattagtggattgggcatgttcgttgccaaaaacgaagaaatggttccggtggcaaaaactcgtgctttgtatgcaccccgacacaccctttttcgaaatgtgtgacgtgcgataacgaaattgcgagaaaccaccccaaacatgagttttggacctaaagtagtggattgggcctgttcgttgcgaaaaacgaagaaacggttccggtagcaaaaactcgtgctctgtatgcacccgacacccgttttcgaaatgtgtgacgtgcgataacgaaattgcgagaaaccaccccaaacatgagttttggacctaaagtagtggattgggcatgttcattgcgaaaaacgaagaaatggttccggtggcaaaaactcgtgctttgtatgcaccccacacccgttttcggaatgggtgacgtgcgacaacgaaattgcgcgaaaccaccccaaacatgagttttggacctaaagtagtggattgggcatgttcgttgccaaaaacgaagaaatggttccggtggcaaaaactcgtgctttgtatgcaccccgacaaccgttttcagaatgggtgacgtgcggcaacgaaattgcgcaaaactacctcaaacatgagttttggacctaaagtagtggagtgggcatgttcattgcgaaaaacgaagaaatggtttcggtggcaaaaacgcgtgctttgtatgcaccctgacaaccgtttttagaatgggtgacgtgcggcaacgaaattgcgcgaaaccaccctaatcatgagttttggacctaaagtagtggattgggcatgttcgttgcgaaaaacgaagaaatggttccggtggcaaaaactcgtgctttgtatgcaccccgacactagttttcggaatgggtgacgtgcgacaacgaaattgcgcgaaaccacctcaaacatgagttttggacctaaagtagtggattgggcatattcgttgcgaaaaacgaagaaatggttccggtggcaaaaagttgtgctttgtatgcacccgacacccgttttcggaatgggtgacgtgcggcaacgaaattgcaggaaaccaccccagacatgagttttggacctaaagtagtggattgggcctgttcgttgcgaaaaacgaagaaatggttccggtggcaaaaactcgtgctttgtatgcacccgacacccgatttcgaaatgtgtgacgtgcgataacgaaattgcgagaaaccaccccaaacatgagttttggacctaaagtagtggattgggcatgttcgttgtgaaaaacgaagaaatggttccggtggcaaaaactcgtgctttgtatgcactccacacccgttttcggaatgggtgacgtgcgacaacgaaattgcgcgaaaccaccccaaacatgagttttggacctaaagtagtggattgggcatgttcgttgcgaaaaacgaagaaatggttcctgtggcaaaaactcgtgctttgtatgcaccccgacacccgttttcggaatgggtgacgtgcgacaacgaaattgcgcgaaaccacccgaaacatgagttttggacctaaagtagtggagtgggcatgttcgttgcgaaaaacgaagaaatggttccggtggcaaaaagtcgtgctttgtatgcacccgacacccgttttcggaatgggtgacgtgcggcaacgaaattgcaggaaaccaccccaaacatgagttttggacctaaagtagtggattgggcatgttcgttgcgaaaaacgaagaaatggttccggtggcaaaaactcgtgctttgtatgcacccgacacccgatttcgaaatgtgtgacgtgcgataacgaaattgcgagaaaccaccccaaacatgagttttggacctaaagtagtggattgggcatgttcgttgtgaaaaacgaagaaatggtttcggtggcaaaaactcgtgctttgtatgcactccacacccgttttctgaatgggtgacgtgcgacaacgaaattgcgcgaaaccaccccaaacatgagttttggacctaaagtagtggattgggcatgttcgttgcgaaaaacgaagaaatggttcctgtggcaaaaactcgtgctttgtatgcaccccgacagccgttttcggaatggttgacgtgcgacaacgaaattgcgcgaaaccaccccaaacatgagttttggacctaaaatagtggattgggcatgttcgttgcgaaaaacgaagaaacggttccggtggcaaaaactcatgctttgtatgcaccccgacaccggttttcggaatgggtgacgtgcgacaacgaaattgcgcgaaaccaccccaaacatgagttttggacctaaagtagtggattgggcatgttcgttgcgaaaaacgaagaaatggttccggtggcaaaaactcgtgctttgtatgcaccccgacaccagttttcggaatgggtgacgtgcggcaacgaaattgcgcaaaaccacctcaaacatgagttttggacctaaagtagtggattgggcatattcgttgcgaaaaacgaagaaacggttccggtggcaaaaactcgtgctttgtatgcacccgacacccgttttcggaatgggtgacgtgcgacaacgaaattgcgcgaaaccaccccaaacgtgagttttggacctaaagtagtggattgggcatgttcgttgccaaaaacgaagaaatggttcctgtggcaaaaactcgtgctttgtatgcaccccgacaaccgttttcagaatgggtgacgtgcggcaacgaaattgcgcaaaaccacctcaaacatgagttttgggcctaaagtagtggagtgggcatgttcgttgcgaaaaacgaagaaatggttccggtgacaaaaactcgtgctttgtatgcaccctgacaaccgtttttagaatgggtgacgtgcggcaacgaaattgcgcgaaaccaccccaaacatgagttttggacctaaagtagtggattgggcatgttcgttgcgaaaaacgaagaaatggttccggtggcaaaaactcgtgctttgtatgcacccgacacccgttttcggaatgggtgacgtgcggcaacgaaattgcgcaaaaccaccccaaacatgagttttgtacctaaagtagtggattgggcatgttcgttgcgaaaaacgaagaaatggttccggtggcaaaaactcgtgcttttatgcacccgacacccattttcggaatgggtgacgtgcgacaacgaaattgcgagaaaccccccccaaatatgagttttggacctaaagtagtggatttgggcatgttcgttgcgaaaaacgaagaaatggttcatgtggcaaaaactcgtgctttgtatgcaccccgacacccgttttcgaaatgggtgacgtgcgacaacgaaattgcgagaacccccctcaaacatgagttttggccctaaagtagtggattgggcattttcgttgcgaaaaaacgaagaaaaggtttcggtggcaaaaactcgtgcctttgtatgcaccctgacacccgttctcagaatggttgacgtgcggcaatgaacttgcgcgaacccaccccacacatgtgtttgagacctaaggtagtggatgggcccttttcgttgcgaaaaagaagaaatggttccggtggcaaaaactcgtgctttgtaagtccccgacacccgttttcggaatgggtgacgtgcgacaacgaaattgcgcgaaaccaccccaaacatgagttttggacctaaagtagtggcttgggcatgttcgttgtgaaaaacgaagaagtggttcctgtggcaaaaactcgtgctttgtatgcaccccgacacccgttttcggaatgggtgacgtgcgacaacgaaattgtgcgaaaccaccccaaacatgagttttggacctaaagtagtggattgggcatattcgttgcgaaaaacgaagaaatgattccggtggcaaaaactcgtgctttgtatgcacccgacacccgttttcggaatgggtgacgtgcgacaacgaaattgcgcgaaaccaccccaaacatgagttttggacctaaagtagtggattgggcatgttcgttgcgaaaaacgaagaaatggttccggtggcaaaaactcgtgctttgtatgcaccccgacaaacgtattcagaatgggtgacatgcggcaacgaaattgcgcgaaaccaccccaaacatgagttttggacctaaagtagtggattgggcatgttcgttgcgaaaaacgaaaaaaatggttccggtggcaaaaactcgtgtttgtatgcacacgacacccgttttcggaatgggtgacgtgcgacaacgaaattgtgtgaaaccaccccaaacatgagttttggacctaaagtagtggattgggcatgttcgttgcgaaaaacaaagaaaatggttccgctggcaaaaactcgtgctttgtatgcaccccgacacccgttttcggaatgggtgacgtgcaacaacgaaattgtgcgaaacaaccccaaacatgagttttgaacctaaagtagtggattgggcatgttcgttgcgaaaaacggagaaatggttccggtggcaaaaactcgtgctttgtatgcacccgacacccgttttcggaatgggtgacgtgcgacaacgaaattgcgcgaaaccaccccaaacatgagttttggacctaaagtagtggattgggcatgttcgttacgaaaaacgaagaaatggttccggtggcaaaaactcgtgccttgtatgcaccctgtctcttatacacatctcaaccatcatcgatgaattttctcgggtgttctcgcatattggctcgaattcgagatcgaattcgcccttagggtttagggtttagggtttagggtttagggtttagggtttagggtttagggtttagggtttagggtttagggtttagggtttagggtttagggtttagggtttagggtttagggtttagggtttagggtttagggtttagggtt

SEQ ID NO: 804 - DNA, 6377 bp, Zea mays
  misc_feature (0)...(0): Zea mays BAC clone full insert sequence contig bacm.pk119.a23.fis41
ctaccttggcttgatcaacctcaattccctgtggagtcacaacataaccaaaaaacgaaactcgatcggtgcaaaatgtgcacttctcaaggttaccaaataaccgtgcatctcgtaaagcattaaaaacagcacgcatgtgatcaacatgttcatccatagatttgccgtagatcaatatgtcatcaaagtatactaccacaaattttccaatgaaggcacgcaaaacctcgttcattaatctcatgaaagtgctaggtgcattagttaacccaaaaggcatgactaaccactcatacaatccgaacttagttttgaaagcagttttccattcatctcccaatttcatacgaatctggtggtacccactacgcaaatcaactttagaaaagacaatggcaccactcaattcatcaagcatatcatctaaacgtggaatagggtgtcgataacgtatcgtgatattattaatagccctacaatcaacacacatacgccatgttccatcttttttaggcactaaaataaccggaacagcacacggactaagagactcacgcacgtaacctttgtcgagtagttcttgcacttgtcgctgaatttcttttgtttcctctggatttgtcctatatggcgcacgattcggcaaagatgcaccaggaataagatcaatttggtgctcaatccctcgtataggtggcagcccctctggtatctcacttggaaatacatcagaatactcctgcaaaatgttagtaataacaggaggcaaagaatgctgcatatcttgaattgaaatcaaagcatccttgcataccaaggcgtaggcaacagtagtggaagcaaataattcattaacatcagtttttgttgcaagcaagcaatgtcctttcaattttatcccatctttgttattaccaacaactttaatattcttgttgttctcagttttagctttggtagctttagcaacatcatcacgcacaatagcctcaggggacatgggaagcaaaataattttcttatcatggtgtatgagagaatattgatttgatctaccatgatgcatacaatctgaatcaaattgccatggtctacctagcagaatattacaagcatccataggcacaacatcacagtcaacaacatcacgatatgaaccaatagcaaaattaattcgtaccagcttggttaccttgaccttaccactattgttgagccattgaatgtgatatggatgcgggtgcggtttggtcgtaagtgcaagcttctccaccatgtcgctgctagccaagttgttgcagctacctccatcaatgatcaaacgacatgaacgctccttaatgacacactttgtttgaaacaacgtatgtcgctgattctgctctgccttctccatttgtgcactaagcacacgctgtacaatgaggctctcataatgctctgcatcatctgcaccaatctgttcttcgggtggttccttagtgcctgcatcatcagccgcaagcaaagcaagtgtagcttcatccaaatcactagcaaaggaatacccaccatcgtcttttaccaccaaaacacgctgattaggacaatcacgttgcacgtgtccatagcccttgcatcgataacatagaacatctcttgttctacccgtggaggctactgaagaggcactacctgctggtttctgggcagatttggttgttgagtttgtggaagatgcacgtggtttgtcaccggaggaaggcgggggtgctggtcgacttggcgagggagttggtgctggtgtacgaccggtcatggacgtagtcgtgcgctgttgccatggtgtagattttcctgcataaacattagaccttgcactagcacgtcgtccctgcacttccctttcatctttgcaagcaagatgaaacaatcgggttacattagcataatctttataagcaaggatgtcctgaatttccctatttaacctgcccaaaaatctagccatagcagattcctcaccctcctctatgttacaacgcagcatacccatttgtaattcctgataatattcttctacacttttagtaccctgtctcaattcttgcaacttgtttaacatatcacgtgcataataagaaggaacaaatctagcccgcatgacacgtttcaacgcatcccaagtttgtggcatgttattaggattcttcttaccatgttctatccaccaaacagaagcaaattcagtaaactcactagtagcagctctaacccgcgcattctcaggaaattcatggcatgcaaacttttgatcaaccgcaatctcccaagtaatgtaagcatcagggtcatatttaccatcaaaaggaggtattttaaatttaaccttactaaaagcatcatcattaccatgtacctcacgtcggcgaaaaccacccatacctctacggttagtacgtagtcgccgacgattatgtgcttcttggtcatcttgttcagtatcagcaacatagtcatcccagttaccttcggcgccctcatcacgcccaccattggttagcatgcatctcatcaaatcgcctcaagagtgcgacaaggctcttgtcaatatgagcaactgtcatttccacatttgcaagtttggtgtttgtgtcgatctgtgtggcctccaattgccccatcttttcattcgtcacctgcatgtcattatcaagaccttccgtgtgcgttttcaccagccttacaaagtgttgtatgatacccttggtgcgaggagagtgtggcatattacgagaagcatcatcaacctccaatcctgccatggttagacgaacagaggcaacaagaaaaaaaatgtgaaggaataaaaactctacaactattaggatgtagctactgcaaggcgctcactctcaacctgccacacaagctcttaccaattcttaccttgcacaacacgaggggtcagcaaccaacaagtctgcaaccgtggaataagtgtatcggtgccgcagcaacacgacctgtcaaactgtagtcgaaatatgtagagttgtaggtgggctgaagcaaggaatacactagtaccacgttagttacaaaagcaagctgaataatcgttcaacggtggtactgtgctggtcctaggctaaaccatgctagagacgtgagcctaggcacaaaggtagtcactgaaaaagaacaactagcacagcacaaagagaaacaacagatttagagattcagcccccttcttcttcttttcctttttttttcttttctattctttcttttcttcttcttctgtttttttttgcagggacctaaacccttttttcactatgacaacccaaacaataaagatattgctaacagcccctttaaatcagatttaacaaatcttgttaatatagaaagtccagaaatctctacgatgattgcggagcgctcagaatgaattttgagacaaggtcagatccgttggaaagaagataagataagctttccagattgtatttaaacttccaaatcggacatgagatgtatccgtggtggcaaaaacgaaccagagatgtttatggtgatggtggatctcgcggtgaccaaaacgtggtagaactcaaaactctaaaggaataaactaagaccagcaactcgacacaaccgatgcaaccaaaaactcaacaagccctaactaagtagtactagtaaatgctcaatggtttataggattgcggtaaaactaatctactattttttggctttttctggactataggagataagaaaacagcgaagaaaagtaaatctctcaccgataaaccttgctctgattaccagctgatgtgcacccgttaggtgattgcccgatctttcgatgagagggtgtggaataactcgattgggggaggagacgacgttcacggcccgactacagccttccaaagacgctgcgccttagcaaccgatacaccacctcctatggctgtcacgatcttgtggagcgtgacaccctagccactagggcactcgtcctgcaagcaatcgaagaactagcaagaacaagtagaacaagtactgaattaccagatctaaatgtaggtttaaaaatcaaactccaatatggtggggttccgaagacaagaagacgggcggctgaactagcacgcgcgcttgcaagcaagtagcgagagctaaacttgatctaaacaaaacccgctgttcttggtggcggctagggggtttataaacatgggaggacgaccacaagggtattggggtcgtgctgcaaccctaggatgcatccctaatggacctaacttgatacacgacccattgggccaaaatagggtgacgcagcaccatgggcagaaaaggcaggaaatgtctcgataagaaaacaatgattacggcggcctcagaacagatatgactataattccggatccataggaaagtagacttgataagctttccatgttgtgcttgaacattccaatccgagcccgcatctgaccgtggtgaccgtcacaagttggtgttcttctgcagtccgaatccagcatgttcaaatccttttccctttcggtcttctccctgattcctaagcaaaacaagagtgcacgggtctccatggtctaaatatgatggacatgaactcaagagtgtaatcacctgatggttgagttgacgagcacgagcgcgagtaatgggaccagaaattggtacttgtattggtatagatgcatcagtagtgttgatgtcttcatcacactattttaggtccaaaactcatgtttggggtggtttcgcgcaatttcgttgtcgcacgtcacccattccgaaaacgggtatggggtgcatacaaagcacgagtttttgccaccggaaccatttcttcgtttttcgcaacgaacatgcccaatccactactttaggtccaaaactcatgtttggggtggtttctcgcaatttcgttatcgcacgtcacacatttcgaaaacgggtgtcgggtgcatacaaagcacgagtttttgccaccggaaccatttgttcgtttttcgcaacgaacaggcccaatccactactttaggtccaaaactcatgtttggggtggtttcgcgcaatttcgttgccgcacgtcacccattccgaaaacgggtgtcgggtgcatacaaagcacgagtttttgccaccggaaccatttcttcgtttttcgcaacgaacatgcccaatccactactttaggtacaaaactcatgtttggggtggttttgcgcaatttcgttgccgcacgtcacccattctgaaaacggttgtcggggtgcaataaaagcacgagtttttgccaccggaaccatttcttcgtttttcgcaacgaacatgcccaatccactactttaggtccaaaactcatgtttggggtggtttcgcacattttctttgtcgcacgtcacccattccgaaaacgggtgtcggggtgcatacaaagcatgagtttttgccaccggaaccgtttcttcgtttttcgcaacgaatatgcccaatccactattttaggtccaaaactcatgtttggggtggtttcgcgcaatttcgttgtcgcacgtcacccaatccgaaaacgggtgtcggggggcatacaaagcacgagtttttgccacaggaaccatttcttcgtttttcgcaacgaacatgccaaatccactactttaggtccaaaactcatgtttggggtggtttcgcgcaatttcgttgtcgcacgtcacccattccgaaaacgggtgtggggtgcatacaaagcacgagtttttgccaccggaaccatttcttcgtttttcgcaacgaacatgcccaaatccactactttaggtccaaaactcatgtttggggggggtatcgcgcaatttcgttatcgcacgtcacacatttcgaaaacgggtgtcgggtgcatacaaagcacgagtttttgccaccggaaccatttcttcgtttttcgcaacgaacatgcgcaatccactactttaggtccaaaactcatgtttggggtggtttcgcgcaatttcgttgccgcacgccacccattctaaaaacggttgtcagggtgcatacaaagcacgagtttttgccaccggaaccatttcttcgtttttcgcaacgaatatgcccactccactactttaggtccaaaactcatgtttgaggtggttttgcgcaatttcgttgccgcacgtcacccattctgaaaacggttgtcggggtgcatacaaagcacgagtttttgccactgggaccatttctacgtttttggcaacgaacatgccaactttaggtccaaaactcatgtttggggtggttttgcgcaatttcgttgtcgcacgtcacccttattg

SEQ ID NO: 805 - DNA, 5487 bp, Zea mays
  misc_feature (0)...(0): Zea mays BAC clone full insert sequence contig bacm.pk119.a23.fis42
cagaataggtgacgtgcgacaacgaaattgcgcgacaccacctcaaacatgagatttggacttaaagtgggcatgtacgttgcgaaaaacgaagcaatggttccggtggcaaaaactcgtgctttgtatgcaccccgacacccgtcttcggaatgggtgacgtgcgacaaggatattgcgcgaaaccaccccacacatgagttttgtagctaaagtagtgcactacttgggcatgtttgttgcgaaaaaacgaagaaatggttccggtggcaaaaactcgtgctttgtatgcacccgacacccgttttcggaatgggtgacgtgcgacaacgaaattgcgagaaaccaccccaaacatgagttttggacctaaagtagtggattgggcatgttcgttgcgaaaaacgaagaaatggttccggtggcaaaaactcgtgctttgtatgcagcccgacacctgttttcgaaatgggtgacgtgcaacaacaaaattgcgagaaaccaccccaaacatgagttttggacctaaagtagtggattgggcatgttcgttgcgaaaaacgaagaaatggttccggtggcaaaaactcgtgcttttatgcacccgacacccgttttcggaatgggtgacgtgcggcaacgaaattgcgcgaaacgaccccaaacatgagttttgtacctaaagtagtggattgggcatgttcgttgcgaaaaacgaagaaatggttccggtggcaaaaactcgtgctttgtatgcagcccgacacctgttttcgaaatgggtgacgtgcagcaacgaaattgcgagacaccaccccaaacatgagttttggacctaaagtagtggattgggcatgttcgttgagaaaaaagaagaaatggttccggtgacaaaaactcgtgcttttatgcacccgacacccgttttcggaatgggtgacgtgcggcaacgaaattgcgcgaaaccaccccaaacatgagttttgtacctaaagtagtggattgggcatgttcgttgcgaaaaaagaagaaatggttccggtggcaaaaactcgtgctttgtactgataaccgttttcagaatgggtgacgcgcggcaacgaaattgcgcgaaaccacccaaaacatgagttttggacctaaagtagtggattgggcatgttcgttgcgaaaaacgaagaaatggttccggtggcaaaaactcgtgctttgtatgcacccggcacccgttttcggaatgggtgacgtgcgacaacgaaattgcgcgaaaccaccccaaacatgagttttgtacctaaagtagtggattgggcatgttcgttgcgaaaaacgaagaaatggttccggtggcgaaaactcgtgcttttatgcaccccgatacccgttttcagaataggtgacgtgcgacaacgaaattgcgcgaaaccacctcaaacatgagatttggacctaaagtgggcatgtacgttgcgaaaaacgaagaaatggttccggtggcaaaaactcgtgctttgtatgcaccccgacacccgttttcggaatgggtgacgtgcgacaacgaaattgcgcgaaaccaccccaaacatgagttttggagctaaagtagtgcactacttgggcatgtttgttgcgaaaaaacgaagaaatggttccggtggcaaaaactcgtgctttgtatgcacccgacacccgttttcggaatgggtgacgtgcgacaacgaaattgcgagaaaccaccccaaacatgagttttggacctaaagtagtggattgggcatgttcgttgcgaaaaacgaagaaatggttccggtggcaaaaactcgtgctttgtatgcaccccgacacctgttttcgaaaggggtgacgtgcaacaacaaaattgcgagaaaccaccccaaacatgagttttggacctaaagtagtggattgggcatgttcgttgcgaaaaacgaagaaatggttccggtggcaaaaactcgtgcttttatgcaccccgatacccgttttcagaatgggtgacgtgcgacaacgaaattgcgagaaaccacctcaaacatgagttttggacctaaagcagtggattgggcatgttcgttgcgaaaaacgaagaaatggtttcgctggcaaaaactcgtgctttgtatgcaccccgacactgtggcagaaccacccgaattattccagcttaagtgcctcagtcatgcctcaggggccgtaacacacttaaatcggaataacccgtcagttcttcagatctagtctgatagagccacttaactaggatcaaattccacaatctcactcgaaggtgagtcacagaagaaatacaataaaacaggaaaccacaaattaagtactgagttattacataaatcggagtttttgcgtagcaaataaagttcacaaaataaagtgcagcggataatcgatgtcgttggtaatgaggaaatggacaaggcctagcccactattcctcatgctcctctccagtcggagcaacatcccactcgaccgtccaaccaggtggcagggtggtaggccaactcacaccatcaaccatatcctgaatggtacctgcaaaaatggtgccacaagcaaggctgagtatactaatactcagctagacttaaccggtgtgaggagtctactcctctacctctagactatgcagctgtttggctgaggggtttggtttgccaaaagcactagttgtttctaaaatcaatttttagcttttcaaattctaccatcattaacttagctagatttgcttcttttaagcagacatggtgatgaagctgaggtgcccgatctttcggcgagtagagataattccgatttgtcggaagatgacccttgcgatccgactacgacgagcaagcccgaggcgccaatgcaatcgctgaaccaactccctgtggttaccgaccttgctgatgcgagatcggcctgatcacgaagatcgtttcctgtgcgcaatcgaagaacgaacaagaacaagatgcgagcaatctaatctattactcgagggtggagttctgaatacacgaagacagcgcagatttgcgcgtgttcgagagtagctaaggctaacgtaaaacaaaactcgagaataaaggaggcgcagctcctggataaatagagggggcgcagcccctagggcggccaaccctaggtcgtccactatgggccgcagttgggctggtcgtctattcttctaggccctcattcttcagtagcatgacgaagttaagatctctggcacgggcccgagtgattggccgtcgtgaatttgggcaagatcgctgtgaaggatttgttcacctgaccaagctttgtcttttgtgtatggacgtcgcgcggttttaggctagggacagggagttgtagcgtcaccaaggtgctagtgtcagaatgcctggtcccgaggtcaagctgcgccaaaaccatgccaaatgaatttggtttgagttcaaacttttccaggatgtgttcaagggaatttggcacgactttgatatttggatctcctggctttgagtttcaaaaagcagagaacgcagatgatctttgggaagaggtctgaaattcagaaattcagaaatctgaatttctctaagggttcatagatcaagggctgatttggggatttatttgagttattttggctaagctttctcaacctttcttgttgctcgataaatatactttaacttatataattggctcaaatcaacattttaaacttttcattccctttctcttattttcttgaattttgctcatggggctcacttagggtttttaattagggctgcacattcttaccttttcaaggactcaattgttttgatcatgacacttttaagtatatacttggtgacttctttattacttaagttattttgatgctcatgcttactttggttctcataaaataatggttctaggtttggcattttgagagaaaccctaggtgacactggggtgtcacagccttcccccttaaaggaatctcgtcccgagattcgggccagagtcctcctagggtgaagcgaagggtgagacttatacgaaatgggtgattgttgttattattagggtaaaattgctcttcgaatgtcattctctttgaaacatcagaaggaagtccttttaagttttacttcatagtttcttcattctgaattaagatcatatttttggaaattagattcgaagggcgggaggaggggttgggggtgattacgtaccagcttccttaggtaggcaatcggggaagttggatcttaagaattcctcggtttcccaagtagcttcctcctctgagtgattactccactggaccttgtacatcttgatcgatttagcccgagttgatctttctttgcaatccagaatcttggaggggtactcttggtacgatagatctggctctatctccaattctggttctgctatgatctcggtcggcaatcgaacacacttcttcagctgagatacatggaatacactgtgaatggcagacatctttgaaggtaacttcagcttgtatgccacgggtccacatgcttctatgatctcataaggtccaatgtaacgaggggctagcttgcctttgatcccaaacctctgcactcccttggtgggtgataccttgaggtatacaaaacttcccacctcgaactggagaggttttcttcttttatcatgatagctcttctgcctggcctgagcagcttctagattcttcctgattagcttgaccttcctttcagcttcagtcactaaatcaggtccaaaaacttctctttcaccaggttgagaccaattgagtggtgtcctacacctttttccatagagagcttcaaaaggtgccatctttaggctggattgataactattgttataagcaaactctgccaaggagaggtgcttatcccagttcttgccacaatcgatcgcacaagctctcagcatatccttcaggatttggtttaccctttccgtctgaccatcagtctgtgggtggtaagctgaactcctgattagcttggttcccaaagactcttgcaattgttcccaaaatctggcaacaaattgggctcctcggtcagaaacaatggtccgaggtaatccgtgcaaacacacgatccggtcaatatacaattctgcatatttctgagccttatcagtggtgtgcacaggaagaaaatgtgccactttcgtcaatcggtccacaataacccaaatcgaatcatgatgacgagaggtgttgggcagacccacaatgaaatccatgatgatgtcatcccacttccacgaaggtacggacagtggttgcaaagctccagctgacttcaagtggcttgcctttatcctctgacaggtgtcacactttgatacatactgagctatctccctcttcattctggtccaccagtacaaaggcttcagatcatggtacatcttggtgcttcccgggtg

SEQ ID NO: 806 - DNA, 11393 bp, Zea mays
  misc_feature (0)...(0): Zea mays BAC clone full insert sequence contig bacm.pk119.a23.fis43
acttacaaaaaacatggtttttttgtcttaaaaaaagggggctgggttttttttttggggagaaaaaggaaaaaaagatttcgtggggagaaaaaccccccgccttgttgtgtcccccccccccccttttttgggagggggggtgttggggggcccacgacgttgggaggcccccccccaaaaaaaaaattttggccccataagtcggggaatggcccttttttcgttgaaaaaaaaaaaaaaaaaatgcttccggcggcaaaacctcctgcttttttgggcccccccccccccgttttttggatggggtggcgggccaccaaaaaaaaagaaagaaccccccccaaacaaaatttttatttctaaagtaggggattgggcttttttgttgcgaaaaacgaaaaaatggttccgggggcaaaaactcgttctttgtatgcaccccgacacctgttttcagaatgggtgacgtgcgacaacgaaattgcgcgacccccccccaaacatgagttttggacctaaagtagtggattgggcatgttcgttgtgaaaaacgaaaaaatggttccggtggtaaaaactcgtgttttgtatgcccccgacacccgttttcggaatgggtgacgtgcgacaacgaaattatgtgaaacccccccaaacatgagttttggacctaaagtagtggattgggcatgttcgttgcgaaaaacgaagaaatggttccggtggcaaaaactcgtgcttttataaatacccgttttcagaatgggtgacgtgcgacaacgaaattgcgcgaaaccacctcaaacatgagttttggacctaaagtagtggattgggcatgttcgttgcgaaaaacgaagaaatggttccggtggcaaaaactcgtgctttgtatgcacccccacacccgttttcagaatgggtgacgtgcggcaacgaaattgtgcgaaaccacccaaacatgagttttgaccctaaagtagtgaattgggcatgttcgttgtgaaaaacaaagaaatggttccggtggcaaaaactcgtgctttgtatgcacccgacacccgttttcggaatgggtgacgtgcgacaactgatgtagctgaggtgcccgatctttcggcgagtagagataattccgatttggcggaagatgacccttgcgatccgactacgacgagcaagcccgaggcgccaatgcaatcgctgaaccaactccctgtggttaccgaccttgctgatgcgagatcggcctgatcacgaagatcgtttcctgtgcgcaatcgaagaacgaacaagaaaaagaggcgagcaatctaatctattactcgagggtggagttctaaatacacgaagacagcgcagatttgcgcgtgttcgagagtagctaaggctaacgtaaaacaaaactcggaaaataaaggaggcgcagctcctgaataaatagagagggggcgcagcccctaggggcggccaaccctaggtcgtccattatgggccacaattgggctggtcgtctattcttccgggccttcgttctttaacaacatgatgtagttcaattctcttgcacgggcccgagtcactggcccaagtggaaggggtggcgcctgggctagagaaggtgctgctggtgtagatgtgctcgtgttggtgttgatgtccgcatcatcctccccttcttgaactgaagtcgtcctcaacggcaactcctcatgttctcccgcatacggtttcaaatctgcaacattaaaactagtggaaacaccaaactccgcaggcaggtcaaggatataagcattatcattaatcttggttggtaccttaaaaggaccagcagcacgaggcatcaatttagaacggcgcaaagtaggaaaacgatcctttctcaaatgcaaccaaaccatatcaccaggttcaaaagtaacatgttttcttcctttactaccagcaacctgattttttgcattagtagcagcaatgttctgtttcgtttgttcatgtatggtaatcatttgttcaacatgtgcagaagcatctacatgtggggcgttcgcagcattaagtgaaatcaaatcaataggtgccctaggaatgtaaccataaacaatctggaaagggcacatctttgtagaagaatgtgtggcatgattgtaaacaaattcaacatgaggcaagcaatcctcccaacgtctcaaattcttgtttaaaacagccctaagcatggtagataaagttctatttactacctcagtttgtccatcagtctgagggtgacaagtagtgctaaacaacaatttagttcccaatttattccaaagagatctccaaaaatggcttagaaacttagcatcgcgatcagagactattgtttttggaataccatgtaaacgaataatttctctaaagaacaattcagcaacaatgctagcatcatcagttttatgacaaggtataaagtgagccattttagagaatctatcaacaaccacaaaaatactatccctccccttcttagttctaggcaagcccaaaacaaagtccatagagatatcaaggcaaggagaagaagggacaggcaaaggcatatacaaaccatggttgttcaaccgtgacttagctttctgacatgtagtgcagcgtgcaacaaggcgctccacatcagcgcgcatccgaggccaaaagaaatgggcagccaacacctcatgcgttttgtagacgccaaaatgccccatgagaccgcctccatgcgcttcatgtaacaacaaaagacgaaccgagctagctggaacacacagcttgttagcgcgaaacaggaacccatcctgtatgtgaaatttaccccatggtatcccattaatacaatggccgaaagcatctttaaaatcagcatcgtcaacatattgatccttcagagtgtccaaaccaaagattttaaaatctaattgtgacagcatggtatagcgacgagacaaagcatcagcaataacattgtccttcccgttcttgtgtttaataatgtaaggaaaggactcaatgaattcgacccatttagcatgacgacggttcagatttgtttgggtacgaatatgttttaaagcctcatgatcagaatgaattatgaactcacgatgccaaagatagtgctgccatgtatgcaaagtgcgcactaaagcgtaaagctccttatcataagtagaatatttcagactagcaccgcttaatttttcactaaaataagcaactggttttccttcttgtaacaaaacagcacctagcccaataccgctagcatcgcattcatgctcaaaaactttattaaaatcaggcaattgcaagaggggagcttgggttaacttatctttcaaagtgctgaacgctacctcctgcgaatcactccaagcaaacgacacatctttctttgtaagctcatgtagaggcgctgcaatggagctaaaatcacgaacaaatctgcggtagaaaccggcaagtccaagaaagctccgaatttgtgtgaccgtcgtcggtgtaggccactcccgaatggcagcaatcttgctgctatccacctcaatgccctgcggagtaaccacataaccaagaaacgagacacgttgcgtgcaaaatgtgcacttttccatgttaccaaacaagcgagcagcacacaaagcataaaaaacagcatgcaaatgttctaaatgctcctctatagacttgctgtaaataaggatatcatcgaaataaacaacaacaaacaaacctatgaaggcccgtagaacttcgttcattaaacgtataaaggtgctgggagcattagtcaatccaaatggcataaccaaccattcatataaaccaaatttcgttttaaaagccgttttccattcatcaccgagtttcattctaatctgatggtaaccgctacgcaaatcaaccttagagaaaataatggcaccactaagctcatctaacatatcatcaaggcgtggaataggatatcgataacgaactgtgatgttattaatagcacgacaatctacgcacatacgccatgacccatctttctttggaacgagtaaaacaggaaccgagcaagggctaagagactcgcgaatgtaacccttatcaagcagcgtctgcacctggcgttggatctccttcgtctcctctggatttgtacggtacggggcgcggttcggaagagaagcgccggggatgagatcgatctgatgctcaatgccacggaggggaggaagacccggtggtaagtccgtaggataaacatcagcatactcctgcaaaaggttaacaacagcagggggtatatccaaagacggtgcatcatcaagcggaacaagcatgcgcgagcatacaagtgcataacagggcatatgagcttcatggagatcatcaaaatcagcacgtgtagcaagtaaaacaggagagtgcaacttgatttcagatttaataggtgcggctgatgtcgaattgacttgttgtgcagttttagcagccctagtaagatcatctttcaaaatttggtcaggggtcattggatgtataattattttctggcctttaaacatgaaagaataatgatttgaacgaccatgatgtaaactatcagtatcatattgccaaggtcgacccaataacaaagagcatgcttccataggaataacatcgcaatcagcataatcagaataagaacccagcgaaaaggggacacgtaccgaacgtgttacctttattttaccaccatcattaagccattgaatgtgatacggatgtggatgtgtgcgagtgggcaaggataatttctctaccaacgctgtacttgccaaattgttgcagctgccactatcgatgatgatgcgaatcgaccgttcgtgcacgacgcccttggtatggaatagagtgtgtcgctgatttttttcggcctgcacaacaagactctcatacctatcggcgtcgatgggatcaacgtggacttcctcattttctgcatggttagtggcaatcatagtatgactagtttcctcagaatcactggctgaagagtactcaccattgtcacgtataagcaaggtacgcttgtttgggcagtcccgaatcatatgtccaaaccctctgcaacgatggcactgaatatcccgtgtacgtcctgtggaagaagcggcgcctttggcagggggcgccactggcttggtcgtccctgtgcgcgatgtagtgctaggcgtaggaggtgcagggctggaaggagttgagctgtgtgttggaccccggcctgcaagagagttagtatatgtctttgatcgtcgtccctgcacttcacgttcagctttgcaagcatattcaaacaatgtggttatatcaaaataatccttataatcaagtatatcctgaatttccctgtttaaaccaccacgaaaacgcgccatagcagcgtcatccgactcaaccaaaccacaacgaagcatacccttttgtaactcctggtaatattcctcaacagactgtgaaccttgttgaaaacgctgcattttgttaagcaaatcacaagcataataggaaggaacaaatctgtggcgcatggcagtttttaattgggtccaagtaatgacactgttaatgggaagtttttgtttatactcacgccaccaaattaaagcaaaatcagtaaattcactaatggcagccttcacttggctattagcaggaatatcatggcatgaaaatttctgttctacctctaattcccaatcaagatatgcagcaggatcatatttaccattaaaagatggaattttaaatttaatcttagaaaataagtcattagcgggatgacgaaccacacgacgtgcacgaccacggcgatctccatcgtcctgctcagtgtcaccgccgtattcctgctccatctttgtggtcaaggcatcaaggcgtgccaggatggtgtcgagtgtggtgcgagtcgccgtttgagcaaggtcaagttggttgaaacgctcggtcgtcgaagtgatcgttgaatcaagccgttcatgcatcgtcctaatgtcagcagcaagtccatcaacttgtccccttacttcctgcaactgggcatccaccatgttgggtgctcctgccatagttagtgcaaacaccaaaacaccaaaaggagaaaaaaccaacgacaaaaacaggggtgtactgctcacaaggcgctcacactagtgctgttatcaagttcttatccgttcttaccaagccacagtggtgaactgcaatcaacaggtggaaccggtgaaagattggatgagcgattgcgtggagaaacagaaacctgctcgtcgtagaaatatgtggagttgtgggtaggctgcactcaagtcaaggattagcacgatcaaacaataatgcaaagttgaattatagtgcaaaacacgaaactatattgctggccacaggtgcaaaggatggatggaactagcagaatggcagtaacgtaaatattgtactagtgatgccaaaaaggcactagtagaaatcacaggtgattttgtttttctttgttgtatgatttttttgatatttttcttagcacaagaagcaacaagataggagctacacgaagtttcacctaaaacagatatcagatgtggtatacagaaaatcaggaagttctctgaaaagcgtgcgagaactttgacgaatttttttctttattttcctgaatttttttgacaattttgtcgaaaccaaacagaccgaaggtgagtttggccggcctccgaatggtgtcaacaagctcctgcaaaaatttcagattttttggacacccgagcgaaaagttatgcccggtttacggaaggtacctcaagttatgttttaaaaacgaccgggatgaaacaaccgtatcctttctccttcgttttctttttttttgtttctgtttttttttttgatgtaaccgaaggagaaaaacaaggaagcggtcgttgactcgatttgttttttttctgttttttttcgtaaccgaaggagaaaatcaaggaaacgaccgttgactcggtttgttttttctgttttttttgacgtaaccgaaggagaaaaacaaggaaacaatgttgactcggtttgtggcgtgatcaaacgggagatggtggcggcgctagggtttgaatggtggaagaacacaatgcaaccagcaacaaatgacgcgaaagcacacaaattcaacaatgcagattattgaaagaaagtgcgaggctcaaaagggtgctgggataagatctaacctgaatttttatgtggttttgtggactgtaggaaaaaaaatgctcgataaactcaccgatcaacctggaaatctgataccaattgatgtagctgaggtgcccgatctttcggcgagtagagataattccgatttggcggaagatgacccttgcgatccgactacgacgagcaagcccgaggcgccaatgcaatcgctgaaccaactccctgtggttaccgaccttgctgatgcgagatcggcctgatcacgaagatcgtttcatgtgcgcaatcgaagaacgaacaagaaaaagaggcgagcaatctaatctattactcgagggtggagttctgaatacacgaagacagcgcagatttgcgcgtgttcgagagtagctaaggctaacgtaaaacaaaactcggaaaataaaggaggcgcagctcctgaataaatagagagggggcgcagcccctaggggcggctaaccctaggtcgtccattatgggccgcaattgggctggtcgtctattttttccgggccttcgttctttaacaacatgatgtagttcaattctcttgcacgggcccgagtcactggcccaggtggaaggggtggcgcctgggctagagaaggtgctgctggtgtagatgtgctcgtgttggtgttgatgtccgcatcaacaacgaaattgtgcgaaaccacccccaaacatgagttttggacctaaatagtggattgggcatgttcgttgcgaaaagcgaagaaatggttccgctagcaaaaactcgtgcttttatgcatcccgatacccgttttcagaatgggtgacatgcgataacgaaattgtgcgaaaccacccaaacatgagtattggtcctaaactagtggattgggcatgttcgttgcgaaaaacaaagaaatggttccggtggcaaaaactcgtgctttgtatgcacccgacacccgttttcggaatgggtgacgtgcgacaacgaaattgtgcgaaaccaccccaaacatgagttttggacctaaatagtggatggggcatgttcgttgcgaaaaacgaagaaatgtttcgagtggcaaaaattcgagcttgtatgcaccccgatacccgttttcagaatgggtgacgtgcgacaacgaaattgcgcgaaacccacccaaacatgagttttggacctaaagtagtggattgggcatgttcgttgtgaaaaacgaagaaatggttccggtggcaaaaactcgtgctttgtatgcacccgacacccgttttcggaatgggtgacgtgcgacaacgaaattgcgcgaaaccaccccaaacatgtgttttggacctaaagtagtggattgggcatgttcgttgcgaaaaacgaataaatggttccggtggcaaaaactcgtgctttgtacgcgccccgacacccgttttcggaatgggtgacgtgcgacaacgaaattgcgcgaaaccaccccaaacatgagttttggacctaaagtagtggattgggcatgttcgttgtgaaaatcgaagaaatggttccggtggcaaaaactcgtgctttgtatgcacccgacacccgttttcggaatgggtgacgtgcgacaacgaaattgcgcgaaatcaccccaaacatgagttttggacctagagtagtggattgggcatgttcgttgtgaaaaacgaagaaatggttccggtggcaaaaactcgtcctttgtatgcaccccgacacccgttttcagaatggttgacgtgcgacaacgaaattgcgcgaaaccaccccaaacatgagttttggacctaaagtagtggattgggcatgttcgttgcgaaaaacgaaaaaatggttccggtggcaaaaactcgtgctttgtatgcacccgacaaccgttttcagaatgggtgacgtgcggcaacgaaattgcacgaaaccaccccaaacatgtgttttggacctaaagtagtgcattgggcatgtttgttgtgaaaaacgaagaaatggttccggtggcaaaaactcgtgctttgtatgcaccctgacacccgttttcagaatgggagacgtgcgacatcgaaattgtgtgaaaccacccaaacatgagttttggacctaaagtagtggactgggcatgttcgttgcgaaaaatgaagaaatggttccggtggcaaaaactcgtgctttgtatgcaccccgacacccgttttcagaatgggtgacgcgcggcaacgaaattgcgcgaaaccaccccaaacatgagttttggacctaaagtagtggattaggcatgttcgttgcgaaaaacaaagaaatggttccggtggcaaaaactcgtgctttgtatgcacccgacacccgttttcggaatggctaacgtgcgacaacaaaattgtgcgaaaccaccccaaacatgagttttggacctaaagtagtggattgggcatgttcgttgcgaaaaacgaagaaatggttccagtggcaaaaactcgagcatttatgcaccccaatacccgttttcagaatgggtgacgtgcgacaacgaaattgcgcgaaaccaacccaaacatgagttttggacctaaagtagtggattgggcatgttcgttgcgaaaaatgaagaaatggttccggtggcaaaaactcgtgctttgtatgcaccccgacacccgttttcagaatgggtgacgcgagacaacgaaattgcgcgaaaccaccccaaacatgagttttggacctaaagtagtggattaggcatgttcgttgcgaaaaacaaagaaatggttccggtggcaaaaactcgtgctttgtatgcacccgacacccgttttcggaatggctaacgtgcgacaacgaaattgtgcgaaaccaccccaaacatgagttttggacctaaagtagtggattgggcatgttcgttgcgaaaaacgaagaaatggttccagtggcaaaaactcgagcatttatgcaccccaatacccgttttcagaatgggtgacgtgcgacaacgaaattgcgcgaaaccaacccaaacatgagttttggacctaaagtagtggattgggcatgttcgttgcgaaaaacgaagaaatggttacggtggcaaaaactcgtgctttgtatgcacccgacaccagttttcggaatgggtgacgtgcgacaacgaaattgcgcgaaaccaccccaaacatgtgttttggacctaaagtagtggattgggcatgttcgttgcgaaaaacgaataaatggttccggtggcaaaaactcgtgctttgtacgcgccccgacacccgttttccgaatgggtgacgtgcgacaacgaaattgcgcgaaaccaccccaaacatgagttttggacctaaagtagtggattgggcatgttcgttgtgaaaatcgaagaaatggttccggtggcaaaaactcgtgctttgtatgcacccgacacccgttttcggaatgggtgacgtgcgacaacgaaattgcgcgaaatcaccccaaacatgagttttggacctaaagtagtggattgggcatgttcgttgtgaaaaacgaagaaatggttccggtggcaaaaactcgtcctttgtatgcaccccgacacccgttttcagaaatggttgacgtgcgacaacgaaattgcgcgaaaccaccccaaacatgagttttggacctaagtagtggatggggcatgttcgttgcgaaaaacgaaagaaatggttccggtggcaaaaactcgtgctttgtatgcgccccgacacccgttttcagaatgggtgacgtgcgacaacaaaattgcgcgaaaccaccccaaacatgagttttggacctaaagtagtggattgggcatgttcgttgtgaaaatcgaagaaatggttccggtggcaaaaactcgtgctttgtatgcacccgacacccgttttcggaatgggtgacgtgcgacaacgaaattgcgcgaaatcaccccaaacatgagttttggacctagagtagtggattgggcatgttcgttgtgaaaaacgaagaaatggttacggtggcaaaaactcgtcctttgtatgcaccccgacaaccgttttcagaatggttgacgtgctacaacgaaattgcgcgaaaccacacccaaacatga

SEQ ID NO: 807 - DNA, 9931 bp, Zea mays
  misc_feature (0)...(0): Zea mays BAC clone full insert sequence contig bacm.pk119.a23.fis44
tccactactttaggtccaaaactcatgtttggggtggtttcgcgcaatttcgttgtcgcacgtcactcattccgaaaacaggtgtcgggtgcatacaaagcacgagtttttgccaccggaaccatttctttgtttttcgcaacgaacatgccaatccactactttaggtccaaaactcatgtttggggtggtttcacgcaatttcgttgccgcacgtcacccattccgaaaacgggtgtggggtgcatacaaagcacgggtttttgccaccggaaccatttttcgtttttcacaacgaacatgcccaatccaccactttaggtccaaaactcatgtttggggtggtttcgcgcaatttcgttgtcgcacgtcacccattcggaaaacgggtgtcggggcgcgtacaaagcacgagtttttgccaccggaaccatttattcgtttttcgcaacgaacatgcccaatccactactttaggtccaaaacacatgtttggggtggtttcgcgcaatttcgttgtcgcacgtcacccattccgaaaacgggtgtcgggtgcatacaaagcacgagtttttgccaccggaaccatttcttcgtttttcgcaacgaacatgcccaatccactactttaggtccaaaactcatgtttggggtggtttcgcgcaatttcgttgtcgcacgtcacccattccgaaaacgggtgtcggggtgcatacaaagcacgagtttttgccacaggaaccatttcttcgtttttcgcaacgaacatgcccaatccactactttaggtccaaaactcatgtttggggtggtttcgcgcaatttcgttgtcgcacgtcacccattccgaaaacgggtgtggagtgcatacaaagcacgagtttttgccaccggaaccatttcttcgtttttcacaacgaacatgcccaatccactactttaggtccaaaactcatgtttggggtggtttctcgcaatttcgttatcgcacgtcacccatttcgaaatcgggtgtcgggtgcatacaaagcacgagtttttgccaccggaaccatttcttcgtttttcgcaacgaacatgcccaatccactactttaggtccaaaactcatgtttggggtggtttcctgcaatttcgttgccgcacgtcacccattccgaaaacgggtgtcgggtgcatacaaagcacgagtttttgccaccggaaccatttcttcgtttttcgcaacgaacatgcccactccactactttaggtccaaaactcatgtttggggtggtttcgcgcaatttcgttgtcgcacgtcacccattccgaaaacgggtgtcggggtgcatacaaagcacgagtttttgccaccggaaccatttcttcgtttttcgcaacgaacatgcccaatccactactttaggtccaaaaatcatgtttggggtggtttcccgcaatttttttgccgcacgtcacccattctgaaaacggttgtcgggggtgcatataaagcacgagtttttgccaccggaaccatttcttcgtttttcgcaacgaacatgcccaatccactactttaggtccaaaactcatgtttggggtggtttctcgcaatttcgttgtcgcacgtcacccatttcgaaaacgggtgtcggggtgcatacaaagcacgagtttttgccacatgaaccatttttttgtttttcgcaacgaacatgcccaatccactactttaggtccaaaactcatatttggggtggtttctcgcaatttcgttgccgcacgtcacccattccgaaaacgggtgtcgggtgcatacaaagcacgagtttttgccaccggaaccattttttcgtttttcgcaacgaacatgcccaatccactactttaggtccaaaactcatgtttggggtggcttcgcgcaatttcgttgtcgcacgtcacccattccgaaaacgggtgtcgggtgcatacaaagcacgagtttttgccaccggaaccatttcttcgtttttcgcaacgaacatgcccaatccactactttaggtccaaaactcatgtttggggtggtttcgcacaatttcgttgtcgcaagtcacccattccgaaaacgggtgtcagggtgcatacaaagcacgagtttttgccaccggaaccatttcttcgtttttcgcaacgaacatgcccaatccactactttaggtccaaaacgcatgtttggggtggtttcgcgcaaatttcgttgtcgcacgtcacccattccgaaaacgggtgtcgggtgcatacaaagcacgagtttttgccaccagaaccatttcttcgtttttcgcaacgaacatgcccaatccactactttaggtccaaaactcatgtttggggtggtttctcgcaatttcgttgtagcacgtcacccattccgaaaacgggtatcggggtgcatacaaagcacgagtttttgccaccggaaccatttcttcttttttcacaacgaacatgcccaatccactactttaggtccaaaactcatgtttggggtggtttcgcacatttttgttgccgcacgtcacccattccgaaaacgggtgtcgggtgcatacaaagcacgagtttttgccaccggaaccattttttcgtttttcgcaacgaacatgcccaatccactactttaggtccaaaactcatgtttggggtggtttcgcgcaatttcgttgtagcacgtcaaccattctgaaaacggttgtcggggtgcatacaaaggacgagtttttgccaccgtaaccatttcttcgtttttcacaacgaacatgcccaatccactactctaggtccaaaactcatgtttggggtgatttcgcgcaatttcgttgtcgcacgtcacccattccgaaaacgggtgtcgggtgcatacaaagcacgagtttttgccaccggaaccatttcttcgattttcacaacgaacatgcccaatccactactttaggtccaaaactcatgtttggggtggtttcgcgcaattttgttgtcgcacgtcacccattccgaaaacgggtgtcggggcgcatacaaagcacgagtttttgccaccggaaccatttattcgtttttcgcaacgaacatgcccaatccactactttaggtccaaaacacatgtttggggtggtttcgcgcaatttcgttgtcgcacgtcacccattccgaaaacgggtgtcgggtgcatacaaagcacgagtttttttccaccgtaaccatttcttcgtttttcgcaacgaacatgcccaatccactactttaggtccaaaactcatgtttgggttggtttcgcgcaatttcgttgtcgcacgtcacccattctgaaaacgtgtattggggtgcataaaagcacgagtttttgccaccggaaccatttcttcgtttttcacaacgaacatgcccaatccactaatttaggtccaaaactcatgtttggggtggtttcgcacaatttctttgtcgcacgttagccattccgaaaacgggtgtcgggtgcatacaaagcacgagtttttgccaccggaaccatttctttgtttttcgcaacgaacatgcctaatccactactttaggtccaaaactcatgtttggggtggtttcgcgcaatttcgttgcagcacgtcacccattctgaaaactggtgtcggggtgcatacaaagcacgagtttttgccaccggaaccatttcttcgtttttcgcaacgaacatgaccaatccactactttaggtccaaaactcatgtttggggtcatttcacacaatttggatgtcgcacgtctcccattctggaaacgggtattggggtgcataaaagcacgggtttttgccaccggaaccatttcttcgtttttcgcaacgaacatgcctaatccactactttaggttcaaaactcatgtttggggaggtttcgcacaatttcgttgtcgcacatcacccattccgaaaatgggtgtcgggtgcatacaaagcacgagtttttgccaccagaaccatttcttcgtttttcgcaacgaacatgcctaatccactactttaggtccaaaactcatgtttggggaggtttcgcgcaatttcgttgtagcacgtcacccattccgaaaacgggtgtcggggtgcttacaaagcacgagtttttgccaccggaaccatttcttcgtttttcgcaacgaacatgcccaatccactcctttaggtccaaaactcatgtttggggtggtttcgcacaattttgttgtcgcacgtcacccattccgaaaacgggtgtcgggtgcatacaaagcacgagtttttgccaccagaaccatttttttgtttttctcaacgaacatgcccaatccactactttaggtccaaaactcatgtttggggtggtttcgcgcaatttcgttgtcgcacgtcacccattccgaaaacgggtgtcggggtgcatacaaagcacgagtttttgccagcagaaccatttcttcttttttcgcaacgaacatgcccaatccactactttaggtaactcatgtttgaggtggtttctcgcaatttcgttgtcacacgtcacccattgtgaaaacgggtatcggggcgcataaaagcacgagtttttgccaccggaaccatttcttcgtttttcgcaacgaacatgcccaatccactactttaggtccaaaactcatgtttggggtggtttcacacaattttgttgtcgcacgtcactcattccgaaaacgggtgtcgggtggatacaaaacacgagtttttaccaccggaaccattttttcgtttttcgcaacgaacatgcccaatccactattttaggtccaaaactcatgtttggggtggtttcgcgcaatttcgtttccgcacgtcacccattctgaaaacggttgtcggggtgcatacaaagcacgtgtttttgccaccggaaccatttcttcgtttttcgcaacgaacatgcccaatccactactttaggtctaaaactcatgtttggggtggtttcgcgcaattttgttgtcgcacgtcacccattccgaaaacgggtgtcgggtgcatacaaagcacgagtttttgccaccggaatcatttcttcgtttttcgcaacgaatatgcccaatccactactttaggtccaaaactcatgtttggggtggtttcgcgcaatttcgttgtcgcacgtcacccattccgaaaacgggtgtcggggtgcatacagagcacgaatttttgccaccggaaccatttcttcttttttcgcaacgaacatgcccaatccactactttaggtccaaaactcatgtttgggggtggtttcgcacaatttcgttttcgcacgtcacccattccgaaaactggtgtcgggtgcatacaaagcacgagtttttgccaccagaacaatttctttgtttgtcgcaacgaacatgcccaatccactactctaggtcaaaaactcttgtttggggtggtttcgcgcaatttcgttgtcgcacgtcacccattccgaaaacgggtgtcggggtgcatacaaagcacgagtttttgccaccggaaccatttcttcgattttcgcaacgaacatgcccaatccactactttaggtccaaaactcatgtttggggtggtttcgcgcaatttcgttgtcgcacgtcgcccgttccaaaaacgggtgtcgggtgcatacaaagcacaagtttttgccaccggaaccatttcttcgttttttcgcaacgaacttgcccaatctagtacttttaggtccaaaacacatgtttggggtggtttcgcgcaatttcgttgtcgcacgtcacccattccgaaaacgggtgtcgggtgcatacaaagcacgagtttttgccaccgtaaccatttcttcgtttttcgcaacgaacatgcccaatccactactttaggtccaaaactcatgtttggggtggtttctcgcaatttcgttatcgcacgtcacccattctgaaaacgggtgtcggggtgcatacaaagcacgagtttttgccgccggaaccatttcttcgtttttggcaacgaacatgcccaatccactaatttaggtccaaaacgcatgtttggggtggttcgcgcaatttcgttgtcgcacgtcacccattccgaaaacgggtgtcgggtgcatagaaagcaagagtttttgccaccggaaccgtttcattgtttttcgcaacgaatatacccaatccactactttaggtccaaaactcatgtttgaggtggtttcgcgcaatttcgttgtcgcacgtcacccattccgaaaactagtgtcggggtgcatacaaagcacgagtttttgccaccggaaccatttcttcgtttttcgcaacgaacatgcccaatccactactttaggtccaaaactcatgtttggggtggtttcgcgcaatttcgttgtcgtacgtcacctattccgaaaacaggtgtcgggtgcatacaaagcacgagtttttgccaccggaaccatttcttcgtttttcgcaacaaacatgcccaatccactactttaggtacaaaactcatgtttggggtggttttgcgcaatttcgttgccgcacgtcacccattctgaaaacggttgtcggggtgcaataaaagcacgagtttttgccaccggaaccatttcttcgttttccgcaacgaacatgcccaatccactactttaggtccaaaactcatgtttggggtggtttcgcacaatttctttgtcgcacgtcacccattccgaaaacgggtgtcggggtgcatacaaagcatgagtttttgccaccggaaccgtttcttcgtttttcgcaacgaatatgcccaatccactattttaggtccaaaactcatgtttcgggtggtttcgcgcaatttcgttgtcgcacgtcacccattccgaaaacgggtgtcggggtgcatacaaagcacgagtttttgccacaggaaccatttcttcgtttttcgcaacgaacatgccaaatccactactttaggtccaaaactcatgtttggggtggtttcgcgcaatttcgttgtcgcacgtcacccattccgaaaacgggtgtggagtgcatacaaagcacgagtttttgccaccggaaccatttcttcgtttttcacaacgaacatgcccaatccactactttaggtccaaaactcatgtttggggtggtttctcgcaatttcgttatcgcacgtcacacatttcgaaaacgggtgtcgggtgcatacaaagcacgagtttttgccaccggaaccatttcttcgtttttcgcaacgaacatgcccaatccactactttaagtccaaaactcatgtttggggtgggttcgcgcaatttcgttgtcgcacgtcacccattccgaaaacgggtgtcgggtgcatagaaagcacgagtttttgccaccggaaccgtttcattgtttttcgcaacgaatatacccaatccactactttaggtccaaaactcatgtttgaggtggtttcgcgcaatttcgttgtcgcacgtcacccattccgaaaactagtgtcggggtgcatacaaagcacgagtttttgccaccggaaccatttcttcgtttttcgcaacgaacatgcccaatccactactttaggtccaaaactcatgtttggggtggtttcgcgcaatttcgttgtcgcacgtcacccattccgaaaacaggtgtcgggtgcatacaaaagcacgagtttttgccaccgggaaccatttcttcgtttttcgcaacgaacatgcccaatccaatactttaggtccaaaactcatgtttggggtggtttcgcacaattttgttgtcgcacgtcacccattccgaaaactggtgtcggggtgcatacaaagcacgagtttttgccaccggaaccatttcttcgtttttcgcaacgaacatgcccaatccactactttaggtccaaaactcatgtttggggtggtttcgcgcaatttctttgtcgcacgtcacccattccgaaaacgggtgtcggggtgcatacaaagcacggatttttgccacaggaaccatttcttcgtttttcgcaacgaacatgccaaatccactactttaggtccaaaactcatgtttggggtggtttcgcgcaattttgttgtcgcacgtcacccattccgaaaacgggtgtggggtgcatacaaagcacgagtttttgccaccggaaccatttcttcgtttttcgcaacgaacatgcccaatccactactttaggtccaaaactcatgtttggggtggtttctcgcaatttcgttgtcgcacgtcacacatttcgaaaacgggtgtcgggtgcatacaaagcacgagtttttgccaccggaactgttgggggccttcggcttccgaaggtcctcaaaaacatgatttaacagtgtttctagagtataatgtgtgaacaggtatcttcggactcgtatcagagagggagaagctcaaaagatacgaaggttgacacagcgccgaagctgtgaagcaggaaagcttcggcatgttcgtagaaaagggaaccgacttgaagatgaaaaggccatttagacctcgatagattactatagaattaccaccaaatgtaaagggcatgtatgtaattttgtatgggttgtaccccgtgcctataaataggtgaacagtacccccgtactgttcacgctgatttggtgttcacttttgcgtcacgcttgtactttcatttccttcaaattggaggtacatctgtaattcaatgttatttttatttatatataataatgatatatgatgatctacgtaattctttatgtttcttgtaattcattcttcgtcaatatgtaatgcatttataaaggttcgccctttgtgaccttcatccgaaaatcattatatcccaagggaaataatgtttcgtaggacgaaggacttaaccgattaacattttctatgttgccttgttcttgaagcatttgagaacaagtccccaacattggcgcccacctccggtgaactcacttccactctttgaagttttttatcttcggcgatcataaaccttcgttatggcgccgaagaaagcttcagcacctgggactgcagctctacaaccgctggaccacaatcaggagacagtctctcttcgggaggcccgaagccggaaaaggaaggctgttagcctgtcaccaccagaggacgagttagatcaagaaatcagagatatggagatgcttcatcaacaagtgcagaggaagaaagaaaagatggccaggctagctgaactacagaggcagatagacgaagcctctgaagaagttcgtcaccttgctcaggatgagcaacaccgaaggcctcagcaccaagaccttcatcaggaggattttcccaacggagatgactggtatgacaatttccatcatgggaattttgtctttgacgatgcttctcctctgtccgctgagctgcaggctacaccttggcctccgtcttacaagcctcctcagcttcccgtattcgatggccactcagacccgaagcagtttttgatgagctacgaggcaacagtatcttcctatggtggcaatgctgcggtcatggccaaatcttttgttatggctgtcagaagtgttgctcaaacctggtattcctcccttcgaccaggaacgatcacttcatggcagaagctgaaggacctcttgttaactagcttccaagggtttcagacgaagccggttactgctcaggctctgttccagtgcacccaggatcacgaagaataccttcaggcgtatgtccgaaggttcttgcgtttgagagcacaggcaccaacggtgcccaatgaaattgtcattgaggccatgatcaaggggcttcggccaggaccgtcagctcagtacttcgccaggaagccccctcaaactttggag

SEQ ID NO: 808 - DNA, 7409 bp, Zea mays
  misc_feature (0)...(0): Zea mays BAC clone full insert sequence contig bacm.pk119.a23.fis45
caatttcgttgcagcacgtcacccattctgaaaacggttgtcggggtgcatataaaacacgagtttttgccaccggaaccgtttcttcgtttttcacaacgaacatgcccaatccactactttaggtacaaaactcatgtttggggtggtttcgcgcaatttcgttgccgcacgtcacccattccgaaaatgggtgtcgggtgcataaaagcacgagtttttgccaccggaaccatttcttcgtttttcgcaacgaacatgccccatccactactttaggtccaaaactcatgtttggggtggtttcgcgcaatttcgttgtcgcacgtcacccattccgaaaacgggtgtcggggtgcatacaaagcacgagtttttgccagcggaaccatttcttcgtttttcacaacgaacatgcccaatccactactttaggtccaaaactcatgtttgagggggtttcgcgcaatttcgttgtcgcacgtcacccattctgaaaacgggtgtcggggtgcgtacaaagcacgagtttttgccaccggaaccatttcttcgtttttcgcaacgaacatgcctaatccactactttaggtccaaaactcatgtttggggtggtttcgcagaatttcgttgtcgcacgtcacccattccgaaaacggttgtcggttggatacaaagcacgagtttttgccaccggaaccatttcttcgtttttcgcaacgaacatgcccaatccactactttaggtccaaaactcatgtttggggtggtttctcgcaatttcgttgtcgcacgtcacccattccgagaacgggtgtcgggtgcatacaaagcacgagtttttgccaccggaaccatttcttcgtttttcgcaacaaacatgcccaatccactactttagctccaaaactcatgtttggggtggtttcgcgcaatttcgttgtcgcacgtcacccattccgaaaacgggtgtcggggtgcatacaaagcacgagtttttgccaccggaaccatttcttcgtttttcgcaacgtacatgcccactttaggtccaaaactcatgtttgaggtggtttcgcgcaatttcgttgtagcacgtcaaccattctgaaaacgggtatcggggtgcatacaaaggacgagttttcgccaccagaaccatttcttcgtttttcacaacgaacatgcccaatccactactctaggtccaaaactcatgtttggggtgatttcgcgcaatttcgttgccgcacgtaacccattccgaaaacgggtgtcggatgcataaaagcacgagtttttgccaccggaaccatttctttgtttttcgcaacgaacatgcccaatccactactttaggtccaaaactcatgtttggggtggtttcacgcaatttcgttgccgcacgtcacccattctgaaaacgggtgtcggggcgcgtacaaagcacgagattttgccaccggaaccatttcttcgtttttcgcaacgaacacgcccaatccactactttaggtccaaaactcatgtttggggtggtttcacgcaatttcgttgccgcacgtcacccattctgaaaacgggtgtcggggtgcgtacaaagcacgagtttttgccaccggaaccatttcttcgtttttcgcaacgaacatgcctaatccactactttaggtccaaaactcatgtttggggtggtttcgcagaatttcgttgtcgcacgtcacccattccgaaaacggttgtcggttggatacaaagcacgagtttttgccaccggaaccatttcttcgttttcgcaacgaacatgcccaatccactacttcaggtccaaaactcaagtttggggtggtttcgcgtaatttcattgtcgcacgtcacccattccgaaaacgggtgtcggggtgcatacaaagcacgagtttttgccagcggaaccatttcttcgttttttcgcaacgaacatgcccaatccactactttaggtccaaaactcatgtttgagctggtttcgcgcaatttcgttgtcgcacgtcacccattctgaaaacgggtatcggggtgcataaaagcacgggtttttgccaccggaaccatttcttcgtttttcgcaacgaacatgcccaatccactatttaggtccaaacgtttggggtgctttcgcacaatttttgtcgcacgtcacccattccgaaaacgggtgtcgggtgcatacaaagcacgagtttttgccaccggaaccatttctttgtttttcgcaacgaacatgcccaatccactactttaggtccaaaactcatgtttggggtggtttcacgcaatttcgttgccgcacgtcacccattctgaaaacgggtgtcggggtgcatacaaagcacgagtttttgcctccggaaccatttcttcgtttttcgcaacgaacatgcccaatccactagtttaggtccaaaactgatgtttggggtggtttcgcgcaatttcgttgtcgcacgtcgcccattccgaaaacgggtgtcgggtgcatacaaagcacgagtttttgccaccggaaccatttcttcgtttttcgcaacgaacttgcccaatccactactttaggtccaaaactcatgtttggggtggtttcgcacaatttcgttgtcgcacgtcacccattccgaaaacaggtgtcgggtgcatacctgtctcttatacacatctcaaccctgaagctcttgttggctagtgcgtagtcgttggcaagctctagaggatccccacggcttcccgtgggacgtgtagcagcacgcaagcacttctcaatgcagcaggcacaggatgcccgcacgaacgatgggacacgggcgccgggagtcggctgcacggcagcgggggtcctccaagcagtcacgggtccaagacaactcatgcgccagcgtagccgctacggtcgagccatccaaagcatccctccgcgctgggcgcggcgggtctacttgcgaggacggcgaccgaaggtccaccgagcacgggagaaatggaaaacgcatcgagcaacgggccatcccacagtgcagccactcgtccagggcgtctggccggcgctagccagccatagccggtcgtggctgcgtcacggccgaaccatggccggccaggcagccaacagcgccagctggagctgggcgcggtagggtgctgaccggccacggctaggccgcgagggggtgcggggctcggccgaggagacctggaggagacgctggaaacgctatggtttcagcagcgttccgcccgggtttcggctgcacgagttccctaccccctactatacctgaggggcataccccctcccaggacttcggggagttcagccttcagaaaaccagggtattttccctggacgccacgaaacccatctaagatggccggacacaacgtttttgctcagaatcaggggtttcgctagcgtgacccgttttccctcacgggtcgacccgaacttcgatgtctcacgcggggggaccacgggagggtcccgtgcccttccacgtgcccgtttttgcggccgtggccgaaaatccgtttttggcccgtgcgccatggcgaacccctcgttttcagcccaaacgcaaggccgaacagccctgccacccgtggcagcgcgcctccgagccgttttccctccgttccaccgtgcccttcactcaagacatgcactttaggttcggtgtctttccacatgcttggacttagcttattttcggggtcgtgcccgagcctcagttttcggcccgtgcgccatggcgaacccctcgttttcagcccaaacgcaaggccgaacagccctgccgcctgtggcagcgcgcctcctcccgttttccctccgttccaccttgcccttcactcaagacatgcactttaggttcggtgtctttccacatgcttggacttagcccgtttttgcggccgtggccgaacctcagttatcagcccgcgcgccatggcgaacacctcgttttcagcccaaacgcaaggccgaacagccctgccgcccgtggcagcgcgcctcctcccgttttccctccgttccaccttgcccttcactcaagacatgcactttaggttcggtgtctttccacacgcttggacttagcccgttttcgcggccgtggccgaacctcagttttcagcccgcgcgccatggcgaacacctcgttttcagcccaaacgcaaggccgaacagccctgccgcccgtggcagcgcgcctcctcccgttttccctccgttccaccttgcccttcactcaagacatgcactttaggttcggtgtctttccacacgcttggacttagcccgttttcgcggccgtggccgaacctcagttttcagcccgcgcgccatggcgaacacctcgttttcagcccaaacgcaaggccgaacagccctgccgcccgtggcagcgcgcctcctcccgttttccctccgttccaccttgcccttcactcaagacatgcactttaggttcggtgtctttccacatgcttggacttagcttattttcggggtcgtgcccgagcctcagttttcggcccgcgcgccatggcgaacacctcgttttcagcccaaacgcaaggccgaacagccctgccgcccgtggcagcgcgcctcctcccgttttccctccgttccaccgtgcccttcactcaagacatgcactttaggttcggtgtctttccacatgcttggacttagcttattttcggggtcgtgccctagcctcagttttcggcccgtgcgccatggcgaacccctcgttttcagcccaaacgcaaggccgaacagccctgccgcccgtcgccacgcgcctgctcccgttttccctccgttccaccttgcccttcacttaagacatgcactttaggttcggtgtctttccacaagcttggacttagctaattttggaggtcgtgcccgagcctccgatttcggcccgtgcgccatggcgaacccctcgttttcagcccatacgcaaggccgaacagccctaccgcccgttgccgcgtgcctccgtgtcgttttccctccgttccaccgtgcccttcaccaaagacatccactttaggttcggtgtgtttccacatgcttggacttagtttattttcgggttcgtgccacagccaccatttccggcccgcgcgccatggcgaaccacctgtttttagcccagacgcattgccgaacagccctgccgcccgtcgccgcgggcctccgtgtcgttttccctccgttccatcttgcccttcacccaagacatacacattagcttcggtgtctttccacacgcttggacttagcttatttccgaggccgtgccccagccgctgttttcggcccacgcgccatggcgaaaccctcgttttcagcccaaacgcaaggccgaacagccatgccgcccgtcgccgcgcgcctccgtgtcgttttccctccgttccaccgtgcccttcacccaagacatacacattagcttcggtgtctttccacacgcttggacttagcttatttccgaggccgtgccccagccgccgttttcggcccgcgcgccatggcgaaaccctcgttttcagcccaaacgcaaggccgaacagccatgccgcccgtcgccgcgcacctcctcccgttttccctccgttccaccttgaccttcactccagacatgcactttaggttcggtgtctttccaaacgctgggacttagcccgttttcggaccgtggccgaaccgttgttttcggaccacgcgccatggcgaacacctcgttttcagcccaaacacaaggacgaacatccctgccgcccgtcgccgtgcgcctccgtgccggagcctcagttcgtcgcgtgcctccgtgtcgttttccctccgttccactgtgcccttcaccaaagacatacactttaggttccgtgtctttccacacgcttggacttagcttattttcgagttcgtgcctgagcctcagttttcggcccgtgcgccatggcgaacacctcgttttcagccaggacgcaaggccgaacagccatgccgcccgtcgtcgcgtgcctccgtgtcgttttccctccgttccaccgtgcccttcactcaagacatacaaacaccttagcttcggtgtctttccattccacacgcttggacttagcttattttcgaggtcatgcccgagcctcagttttcggcccgtgcgccatggcgaacccctcgttttcagcccagacgcaaggccgaacagccctgccgcccgtcgccgcgcgcctccgtgccgttttccctctgttcctccgtgcccttcacccaagacatacatattagcttcggtgcctttccacacgcttggacttagcttattttcggggtcgtgcctgaacctcatttttcggcccgtgcgccatggcgaacccatcgttttcggcccaaacgcaaggccgaacagccatgccgcccgtcgtcgcgcgcctccgtgtcgttttccctccgttccaccgtgcccttcactcaagacatacatacaccttagcttcggtgtctttccattccacacgcttggacttagcctattttcgaggtcgtgccccggtcgccgtttgcggcccgcgcgccatggcgaacccctcgttttcagcctagacgcgtggccgaacagccctgccgcccatcgccaacgttccatcgtgcccttcacccaaggcatacgtaggagcttcggtttctttccacacgctgggacttagcttttcttgtggtcgtgcacgaactcacggcggttttcggcctcttgccacgctgcgccttggacgtttccgttcggaagatcggtgcccctctcccgtgggttcgaaacctagtcgctgggcgctgtgtagagtggggggagggacgaatccgtgcgacgcggggctggatctcagtggatcatggcagcaaggccactctgccacttacaatgccccgtcgcgttttaagtcgtctgcaaaggattcagcacgccgcccgttgggaagggagcttcgaggcggcccgccgcggcgcgtcgaccgggcgggctgagccaatggcacgggcccttggggcgcgaacgccctaacgtgggtcggggcgggcggcgagcagaggcgccggttgctagcttggattctgacttagaggcgttcagtcataatccggcacacggtagcttcgcgccactggcttttcaaccaagcgcgatgaccaattgtgtgaatcaacggttcctctcgtggagcttcggtccgggtcacctttgtccaccaagatggaactgcggccggccgctcattaattaagtcaggcgcgcctctagttgaagacacgttcatgtcttcatcgtaagaagacactcagtagtcttcggcca

SEQ ID NO: 809 - DNA, 11686 bp, Zea mays
  misc_feature (0)...(0): Zea mays BAC clone full insert sequence contig bacm.pk119.a23.fis46
ttcttcgtttttcacaacgaacatgcccaatccactactttaggtccaaaactcatgtttggggtggtttctcgcaatttcgttatcgcacgtcacccattctgaaaacggttgtcggggtgcatacaaagcacgagtttttgccacaggaaccatttcttcgtttttggcaacgaacatgcccaatccactactttaggtccaaaactcatgtttggggtggtttcctgcaatttcgttgccgcacgtcacccattccgaaaacgggtgtcgggtgcatacaaagcacgactttttgccaccggaaccatttcttcgtttttcgcaacgaacatgcccactccactactttaggtccaaaactcatgtttggggtggttttgcgcaatttcgttgtcgcacgtcacccattccgaaaacgggtgtcgggtgcatagaaagcacgagtttttgccaccggaaccgtttcattgtttttcgcaacgaagatacccaatccactactttaggtccaaaactcatgtttgaggtggtttcgcgcaatttcgttgtcgcacgtcacccattccgaaaactagtgtcggggtgcatacaaagcacgagtttttgccaccggaaccatttcttcgtttttcgcaacgaacatgcccaatccactactttaggtccaaaactcatgtttggggtggtttcgcgcaatttcgttgtcgcacgtcacccattccgaaaacgggtgtcgggtgcatacaaagcacgagtttttgccaccggaatcatttcttcgtttttcgcaacgaatatgcccaatccactactttaggtccaaaactcatgtttggggtggtttcgcacaatttcgttgtcgcacgtcacccattccgaaaacgggtgtcggggtgcatacaaagcacgagtttttgccacaggaaccacttcttcgtttttcacaacgaacatgcccaatccactactttaggtccaaaactcatgtttggggtggtttcgcgcaatttcgttgtcgcacgtcacccattccgaaaacggttgtcgggtgcatacaaagcacgagtttttgccaccggaaccatttcttcgttttcgcaacgaacatgcccaatccactactttaggtccaaaactcatgtttggggtggtttcgcgtaatttcattgccgcacgtcaaccattctgaaaacggttgtcggggtgcatacaaagcacgagtttttgccagcggaaccatttcttcgtttttcgcaacgaacatgcccaatccactactttaggtccaaaactcatgtttgaggtggtttcgcgcaatttcgttgtcgcacgtcacccattctgaaaacgggtatcggggtgcataaaagcacgagtttttgccaccggaaccatttcttcgtttttcgcaacgaacatgcccaatccactatttaggtccaaactgatgcggacatcaacaccaacacgagcacatctacaccagcagcaccttctccagcccaggcgccaccccttccacctgggccagtgactcgggcccgtgcaacagaattgaactacatcatgttgttaaagaacgaaggcccggaagaatagacgaccagcccaattgcggcccataatggacgacctagggttggccgcccctaggggctgcgccccctctctatttattcaggagctgcgcctcctttatttccagagttttgttttacgttagccttagctactctcgaacacgcgcaaatctgcgctgtcttcgtgtattcagaactccaccctcgagtaatagattagattgctcgcatcttgttcttgttcgttcttcgattgcgcacaggaaacgatcttcgtgatcaggccgatctcgcatcagcaaggtcggtaaccacagggagttggttcaacgattgcattggcgcctcgggcttgctcgtcgtagtcggatcgcaagggtcatcttccgccaaatcggaattatctctactcgccgaaagatcgggcacctcagcttcatcaattggtatcagatttccaggttgatcggtgagtttatcgagtgtttttttcctacagtccacaaaaccacataaaaattcaggttagatcttatcccagcacccttttgagcctcgcactttctttcaataatctgcattgttgaatttgtgtgctttcgcgtcatttgttgctggttgcattgtgttcttccaccattcaaaccctagcgccgccaccatctcccgtttgatcacgccacaaaccgagtcaacatcgtttccttatttttctccttcggttacgtcaaaaaaaacagaaaaaacaaaccgagtcaacggccgtttccttgattttctccttcggttacgaaaaaaaaacagaaaaaaaaaacaaactgagtcaacggccgcttccttgtttttctccttcggttacgtcaaaaaaacagaaaaaaaagataacgaaggagaaaggatacggttgtttcatcccggtcgtttttagaacataacttgaggtaccttccgtaaaccaggcataacttttcgctcgggtgtccaaaaaatctgaaatttttacaggagcttgttgacaccattctgagcccggccaaactgaccttcggtctgtttggtttcgacaaaattgtcaaaaaaatcaggaaaataaagaaaaaaaattcgtcaaagttctcgcacgcttttcagagaacttcctgattttctatagaccacatctgatatctgttttaggtgaaacttcgtgtagctcctatcttgttgcttcttgtgctgagaaaaatatcaaaaaaatcatacaaaaaagaaaaacaaaatcacctgtgatttctactagtgcctttttggcatcactagtacaatatttacggtactgccattctgctagttccatccatcttttgcacctgtggccagcaatatagtttcgtgttttgcactataattcaactttgcattattgtttgatcgtgctaatccttgacttgagtgcagcctacccacaactccacatatttctacgacgagcaggtttctgtttctccacgcaatcgctcatccaatctttcaccggttccacctgttggttgcagttcaccactgtggcttggtaagaacggataagaacttgataacagcactagtgtgagcgccttgtgagcagtacacccctgtttttgtcgttggtttttctccttttggtgtttgcgctaactatggcaggagcacacgacatggtggatgcccagttgcaggaagtaaggggacaagttgatggacttgctgctgacattaggacgatgcatgaacggcttgattcaacaatcacttcgacgaccgagcgtttcaaccaacttgaccttgctcaaacggcgactcgcaccacactcgacaccatcctggcacgccttgatgcactgaccacaaagatggagcaggaatacggcggtgacactgagcaggacgatggagatcgccgtggtcgtgcacgtcgtgtggttcgtcatccccctaatgacttattttctaagattaaatttaaaattccatcttttaatggtaaatatgatcctgctgcatatcttgattgggaattagaggtagaacagaaattttcatgccatgatattcctgctaatagccaagtgaaggctgccattagtgaatttactgattttgctttaatttggtggcgtgagtataaacaaaaacttcccattaacagtgtcattacttggacccaattaaaaactgccatgcgccacagatttgttccttcctattatgctcgtgatttgcttaacaaaatgcagcgttttcaacaaggttcacagtctgttgaggattattaccaggagttacaaaagggtatgcttcgttgtggtttagttgagtcagatgacgctgctatggcgcgttttcgtggtggtttaaacagggaaattcaggatatacttgattataaggattattttgatataaccacattgtttgaatatgcttgcaaagctgaacgtgaagtgcagggacgacgatcaaagacatatactaactcttttgcaggccggggtccaacacacagctcaactccttccagccctgcacctcctacgcctagcactacatcgcgcacagggccggccaagccagtggcgccccctgccaaaggcgccgcttcttccacaggacgtacacgggatattcagtgccatcgttgcagagggtttgggcacatgattcgggactgcccaaacaagcgtaccttgcttatacgtgacaatggtgagtactcttcagccagtgattctgaggaaactagtcatgctatgattgccactaaccatgcagaaaatgaggaagtccacgttgatcccatcgacgccgataggtatgagagccttgttgtgcagcgtgttctcagcacacaggttgcccaggccgaaaaaaatcagcgacacactctattccataccaagggcgtcgtgcacgaacggtcgattcgcatcatcatcgatagtggcagctgcaacaatttggcaagtacagcgttggtagagaaattatccttgcccactcgcacacatccacatccgtatcacattcaatggcttaatgatggtggtaaaataaaggtaacacgttcggtacgtgtccccttttcgctgggttcttattctgattatgctgattgcgatgttattcctatggaagcatgctctttgttattaggtcgaccttggcaatatgatactgatagtttacatcatggtcgttcaaatcattattctttcatgtttaaaggccagaaaataattatacatccaatgacccctgaccaaattttgaaagatgatcttactagggctgctaaaactgcacaacaagtcaaatcgacatcagccgcacctattaaatctgaaatcaagttgcactctcctgttttacttgctacacgtgctgattttgatgatctccatgaagctcatatgccctgttatgcacttgtatgctcgcgaatgcttgttccgcttgatgatgcaccgtctttggatataccccctgctgttgttaaccttttgcaggagtatgctgatgtttatcctacggacttaccaccgggtcttcctcccctccgtggcattgagcatcagatcgatctcatccccggcgcttctcttccgaaccgcgccccgtaccgtacaaatccagatgagacgaaggagatccagcgccaggtgcagacactgcttgataagggttacattcgtgagtctcttagcccttgctcggttcctgttttactcgtcccaaagaaagatgggtcatggcgtatgtgcgtagattgtcgtgctattaataacatcacagttcgttatcgatatcctattccacgccttgatgatatgctagatgagcttagtggtgccgttattttctctaaggttgatttgcgtagcggttaccatcagattagaatgaaactcggtgatgaatggaaaacggcttttaaaacgaaatttggtttatatgaatggttggttatgccatttggattgactaatgctcccagcacctttatgcgtttaatgaacgaagttctacgggccttcataggtttgtttgttgttgtttatttcgatgatatccttatttacagcaagtctatagaggagcatttagaacatttgcgtgctgtttttgacgctttgcgtgctgctcgcttgtttggtaacatggaaaagtgcacattttgcacgcaacgtgtctcgtttcttggttatgtggttactccgcagggcattgaggtggatagcagcaagattgctgccattcgggagtggcctacaccgacgacggtcacacaaattcggagctttcttggacttgccggtttctaccgcagatttgttcgtgattttagctccattgcagcgcctctacatgagcttacaaagaaagatgtgccgtttgcttggagtgattcgcaggaggtagcgttcagcactttgaaagataagttaacccaagctcccctattgcaattgcctgattttaatgaagtgtttgagcttgaatgcgatgctagcggtattgggctaggtgctgttttgttacaagaaggaaaaccagttgcttattttagtgaaaaattaagcggtgctagtctgaaatattctacttatgataaggagctttacgctttagtgcgcactttgcatacatggcagcactatctttggcatcgtgagtttataatccattctgatcatgaggctttaaaacatattcgtacccaaacaaatctgaaccgtcgtcatgctaaatgggtagaattcattgagtcctttccttacattattaaacacaagaacgggaaggacaatgttattgctgatgctttgtctcgtcgctataccatgctgtcacagttagattttaaaatctttggtttggacactgtgaaggatcaatatgttgacgatgctgattttaaagatgctttcggccattgtattaatgggaaaccatggggcaaatttcacatacaggatgggttcctgtttcgcgctaacaagctgtgtgttccagctagctcggttcgtcttttgttgttacaggaagcgcatggaggcggtctcatggggcattttggagtctacaagacacatgaggtgttggctgcccacttcttttggcctcggatgcgcgctgatgtggagcgccttgttgcacgctgcactacttgtcagaaagctaagtcacggttgaacaaccatggtttgtatatgcctttgcctgtcccttcttctccttggcttgatatctctatggactttgttttggtcttgcctagaactaagaaggggagggatagtatttttgtggttgttgatagattctctaaaatggctcactttataccttgtcataaaactgatgatgctagcattgttgctgaattgttctttagagaaattattcgtttacatggtattccaaaaacaatagtctctgatcgcgatgctaagtttctaagccatttttggagatctctttggaataaattgggaactaaattgttgtttagcactacttgtcaccctcagactgatggacaaactgaggtagtaaatagaactttatctaccatgcttagggctgttttagacaagaatttgagacgttgggaggattgcttgcctcatgttgaatttgcttacaatcatgccacgcattcttctacaaagatgtgccctttccagattgtttatggttacattcctagggcacctattgatttgatttcacttaatgccgcgaacgccccacatgtagatgcttctgcacatgttgaacaaatgattaccatacatgaacaaacgaaacagaacattgctgctactaatacaaaaaatcaggttgctggtagtaaaggaagaaaacatgttacttttgaacctggtgatatggtttggttgcatttgagaaaggatcgttttcctactttgcgccgttctaaattgatgcctcgtgctgctggtccttttaagatactaaccaagattaatgataatgcttataccctcgacctacctgcggagtttggtgtttccactagttttaatgttgcagatttgaaaccgtatgtgggacaagatgaggagttgtcgtcgaggacgacttcagttcaagaaggggaggatgatgcggacatcaacaccaacacgagcacatctacaccagcagcaccttctccagcccaggcgccaccccttccacctgggccagtgactcgggcccgtgcaagagaattgaactacatgatgttgttaaagaacgaaggcccggaagaatagacgaccagcccaattgcggcccataatggacgacctagggttggccgcccctaggggctgtgccccctctctatttattcaggagctgcgcctcctttatttccagagttttgttttacgttagccttagctactctcgaacacgcgcaaatctgcgctgtcttcgtgtattcagaactccaccctcgagtaatagattagattgctcgcatcttgttcttgttcgttcttcgattgcgcacaggaaacgatcttcgtgatcaggccgatctcgcatcagcaaggtcggtaaccacagggagttggtttagcgattgcattggcgcctcgggcttgctcgtcgtagtcggatcgcaagggtcatcttccgccaaatcgaaattatctctactcgccgaaagatcgggcacctcagcttcatcacaaacgtttggggtggtttcgcacaatttttgtcgcatgtcacccattccgaaaacgggtgtcgggtgcatacaaagcacgagtttttgccaccggaaccatttctttgtttttcgcaacgaccatgcccaatccactactttaggtccaaaactcatgtttgggtggtttcgcacaatttcgtcgccgcacgtcacccattctgaaaacgggtgtggggtgcatacaaagcacgagtttttgccaccggaaccatttcttcgtttttcgcaacgaacatgcccaatccactactataggtccaaaactcatgtttgaggtggtttcgcgcaatttcgttgtcgcccgtcacccattctgaaaacgggtatgcacgaaagcacgagtttttgccagcggaaccatttcttcgtttttcgcaacgaacatgcccaatccactactttaggtccaaaactcatgtttgaggtggtttcgcgcaatttcgttgtcgcacgtcacccattctgaaaacgggtatcggggtgcataaaagcacgagtttttgccaccggaaccatttcttcgtttttcgcaacgaacatgcccaatccactatttaggtccaaaactcatgtttggggtggtttcgcacaatttcgttgtcgcacgtcacccattccgaaaacgggtgtcgggtgcatacaaagcacgagtttttgccaccggaaccatttctttgtttttcgcaacgaacatgcccaatccactactttaggtccaaaactcatgtttgggtggtttcgcacaatttcgttgccgcacgtcaccctttctgaaaacgggtgtgggggtgcatacaaagcaagagtttttgccagcggaaccatttcttcgtttttcgcaacgaacatgcccaatccactactttaggtccaaaactcatgtttgaggtggtttcgcgcaatttcgttgtcgcacgtcacccattctgaaaacgggtatcggggtgcataaaagcacgagtttttgccaccggaaccatttcttcgtttttcgcaacgaacatgcccaatccactatttaggtccaaaactcatgtttggggtggtttcgcacaatttttgtcgcacgtcacccattccgaaaacgggtgtcgggtgcatacaaagcacgagtttttgccaccggaaccatttctttgtttttcgcaacgaacatgcccaatccactactttaggtccaaaactcatgtttgggggggttcgcacaatttcgttgtcgcacatcacccattccgaaaacgggtgtcggggtgcatacaaagcacgagtttttgccacaggaaccatttctttgtttttcgctacaaacatgcccaatccactactttaggtccaaaactcatgtttgaggtggtttcgcgcaatttcgttgtcgcacgtcacccattctgaaaacgggtatcggggtgcataaaagcacgagtttttgccaccggaaccatttcttcgtttttcgcaacgaacatgcccaatccactactttaggtccaaaactcatgtttggggtggtttcacataatttcgttgtcgcacgtcacccattccgaaaacgggtgtcgggtgcatacaaaacacgagtttttaccaccggaaccattttttcgtttttcacaacgaacatgcccaatccactactttaggtccaaaactcatgtttggggtggtttcgcgcaatttcgttgccgcatgtcacccattctgaaaacggttgtcggggtgcatacaaagcacgagtttttgccaccggaaccatttcttcgtttttcgcaacgaacatgcccaatccactactttaggtataaaactcatgtttggggtggtttcgcgcaatttcgttgtagcacgtcacccattccgaaaacgggtgtcgggtgcatacaaagcacgagtttttgccaccggaatcatctcttcgtttttcgcaacgaatatgcccaatccactactttaggtccaaaactcatgtttggggtggtttcgcgcaatttcgttgtcgcacgtcacccattccgaaaacgggtgtcggggtgcatacaaagcacgagtttttgccaccggaaccatttcttcgtttttcgcaacgaacatgcccaatccactcctttaggtccaaaactcatgtttggggtggtttcgcacaatttcgttgtcgcacgtcacccattccgaaaacgggtgtcgggtgcatacaaagcacgagtttttgccagcggaaccatttctttgtttttcgcaacaaaaatgcccaatccactactttaggtccaaaactcatgtttgaggtggtttcgcgcaatttcgttgtcgcacgtcacccattctgaaaacgggtatcggggtgcataaaagcacgagtttttgccaccggaaccatttcttcgtttttcgcaacgaacatgcccaatccactatttaggtccaaaactcaagtttggggtggtttcgcacaatttttgtcgcacgtcacccattccgaaaacgggtgtcgggtgcatacaaagcacgagtttttgccaccggaaccatttctttgtttttcgcaacgaacatgcccaatccactactttaggtccaaaactcatgtttgggtggtttcgcacaatttcgttgtcgcacgtcacccattccgaaaacgggtgtcggggtgcatacaaagcacgagtttttgccaccggaaccatttctttgtttttcgcaacgaacatgcctaatccactactttaggtccaaaactaatgtttggggaggtttcgcgcaatttcgttgtcgcacgtcacccattccgaaaacgggtgtcggggtgcatacaaagcacgagtttttgccaccggaaccatttcttcgtttttcgcaacgaacatgcccaatccactactttaggtccaaaactcatgtgtggggtggtttcgcgcaatttcgttgtcgcacgtcacctattccgaaaacaggtgtcgggtgcatacaaagcacgagtttttgccaccggaaccatttcttcgtttttcgcaacgaacatgcccaatccactactttaggtacaaaactcatgtttggggtggttttgcgcaatttcgttgccgcacgtcacccattctgaaaacggttgtcggggtgcatacaaagcacgagtttttgccaccggaaccatttcttcgttttccgcaacgaacatgcccaatccactactttaggtccaaaactcatgtttggggtggtttcgcacaatttctttgtcgcacgtcacccattccgaaaacgggtgtcggggtgcatacaaagcatgagtttttgccaccggaaccgtttcttcgtttttcgcaacgaatatgcccaatcc

SEQ ID NO: 810 - DNA, 22801 bp, Zea mays
  misc_feature (0)...(0): Zea mays BAC clone full insert sequence contig bacm.pk119.a23.fis47
caagccctcggacccggccaaacttcaccggaggcccgagatcgacctcaccggacttcggtcttccgccgccgcgcgtggaccgagctatctagtgagtctccgcccaattccttgcgctcatgtcttctctggcatcccgtggacctccctgacccatctgattgaactatctcgccgtgaccaggccggtctcctcgccgccgacgagcatccccgcctgcgcgcgtggaccgaccggctccggccatctccgacggtgtcccgcacaccgttgtgatccccgagacctccccttcgtcctcgaccacttcaccggagccatctcgccgccggtaagcccctccgccctttcttccgccgcggttactgtttaaggtagaagaaggacctcgggttaggatttgtagaacccgaggggttttctgtaacgtcagtgactcatgtgaatagtagcttaaggactgatccgcgaagaaaacttaaaaacccgccagggacccagtgcaaagtagttttccatttaaccaattctgttattctttttaaaatgaccagagaacttagaaaacccataacttgatgaattcttcataaaaaagttgccaaaccaattttgctagctcctgaatattatgaactatcatttaaaaataataaaccctatgctttctgttctaaattttagagtttgattttaaaaacagaaacccaccaaaccttgtttaattaaggaaaattagtttttcttctgtgctgaacttaagaaaatttgtagatgttcaaaccttatttagacactgtttaaaaatagtaggaaccccagcattagaaattatgatgtagttattcatttaaagctattttgtccaaaacttagagaaaatcagaagggcattagaaattaatgaacagtgattaagattatttttcctagtttttacttatgtaacagagaacttaggaaaaatacagagaccattaatttggaccagtttttaattaaaatgatttagttagccttatatagactgaaaatcaattattagagaggcaaaactataaccaaaatgaataataaaaatctagtggacttccaacacctagagccccactacaaaaataaagagcacctcagcccaactttttaagtaaggaaaataaatacaaagtgataataaggcattttccaaataaatcatgaacaacccctattaatgtgatattgggcaaccaaaaatttgctaagtccatgatgagataaaccaccagagaaaaatgccaacccatgaaaaggaagcaaactcataccatttgctaatgatttaagagaaaggccaattaattcaaataatgcataccaccccttcccttaagcaaaaagatgccaaacttcagaatgattgctcttgcacaaaataataactaagaaaaataagaactctgttgtttgatgcttttcaaatatagtggtagtagaaagcacccatttggctagaaacttgagaaaaccatagaaaataattaaaaagtattaatgattagaaatttgtatcaagccatgttataacacctaaaagccagcaaaaatgagttttggaggatgacccactgttaaataatagttgtagttcaaatcaccccttctgccctagaatttaataattttgtccagagaaaactattcactttctaatccccaaaatttgagacagagaaacacacaccagtaacaagccactgtaatttttgcagaatttatagaattttataaaagcaacttgtagttcaaacctacttccaaacattaaagagaataaaagaaaaggaaagaagaaataaaccccacctcagtaaatctaacttgagtacttatcaattctcactaagacttaaaaggaattcagtggaaccccaaaattttaatctacttaccttagctaagtttaaaccaatttaccaagtatacaacccaagggtcttacataagtaaagttaaccttgtttaactcaaataatcatgcacccttaaagttgtgatttctaaaagcacatgtcatatcatgcatatatcttacgcattgcattcattagattgtaatcttgccgacggagagtacgtgctcatccccgagcaaggacctgtccaagaggaggaccaggagcaggcttcaaagactgctattgaggatctccccgcaggcccagcaattgaaggcaagcctcggttttatgcataacctgttaattatgctattttacttcacttaatgcttgtaggattgcaatgtgcacttaagtataggagttgcttgaaacctctagttgcatgaacttaggattccttttgagataaatactagtatgctaggtcgagtagctgcttgctaatcaggatctcggtagaagtcgagtgatttttctagcactcgcgcgaggtcaggaattgattgtattcatcttgataatgggatatatgttggtctatggacttggatccagggaggatgccttgtccatgagacgggaaaaatggattaaggattaatgtgtggatacctgagtcaagcttttgaacgtactaagcacatgccgggaaaaatggtaaccgggaaacctagtacctgattgaagccgggtgcggactttatccctcatgcgacctgagactgggtctcccatgctagctatggtgggtacaagtgcggccactgcacgacggcagtcggggtcagtggagcattgtatgccaaggcggtgaggcctggacacgaacggggaatcgatggggacggttgtcatgtgtggggtcggagtaccctgacatgccgtgtgtttaggtttaccttgcaaggttaaaactcgattcgaatcgtctgcttctcggagctaatgagactgcttgattccttgtactgcatcgagtaagaagtgaaatgtggttacatgagataacttgttgattgaactaaatgcttgttaccatgtctgcttaaaagaagcaaatctagctaagttaatgatggtagaatttgaaaagctaaaaattgattttagaaacagctagtgcttttggcaaaccaaacccctcagccaaacagctgcatagtctagaggtagaggagtagactcctcacaccggttaagtctagctgagtattagtatactcagccttgcttgtggcaccatttttgcaggtaccattcaggatatggttgatggtgtgacttggcctaccaccctgccaccgggttggacggtcgagtgggatgttgctccgactagagaggagcatgaggaatagtgggctaggccttgcccatttcctcattaccgacgacatcgattatccgctgcactttattttgtgaactttatttgctacgcaaaaactctgatttatgtaataactcagtacttaatttgtggttttctgttttattgtatttcttctgtgactcaccttcgagtgagattgtggaatttgatcctgattaagtggctctatcagactagatctgaagaactgacgggttattccgatttgagtgtgttacggcccctgaggcgtgactgaggcacttaagctggaataattcgggtggttctgccacagctggtatcggagcaaattccaccacagagaaggacaataagccatgaataccaattttcaaaatctaaaacttgcctagaaactactacagatcgtcaagactagaccgctagacctaggacgaaaggccttaggcatagagggagaaataggtggctaactaagtaggccccgtgatgaagctgaggtgcccgatctttcggtgagtagagataattccgatttggcggaagatgacccttgcgatccgactacgacgagcaagcccgaggcgccaatgcaatcgctgaaccaactccctgtggttaccgaccttgctgatgcgagatcggcctgatcacgaagatcgtttcctgtgcgcaatcgaagaacgaacaagaaaaagatgcgagcaatctaatctattactcgagggtggagttctgaatacacgaagacatcgcagatttgcgcgtgttcgagagtagctaaggctaacgtaaaacaaaactcaagaaataaaggaggcgcagctcctggataaatagagagggggcgcagcccctaggggcggccaaccctaggtcgtccattatgggccgcagttgggctggtcgtctattcttccgggccttcgttctttaacagcataatgtagttcaattctcttgcacgggcccgagtcactggcccaggtggaaggggtggcacctggactggggaagatggtgcctgggctggagaaggtgctgctggtgtagatgtgctcgtgttggtgttgatgtcctcatcatcctccccttcttgaactgaagtcgtcctcgacggcaactcctcgtcttctcccgcatacggtttcaaatctgcaacattaaaactagtggaaacaccaaactccgcaggcaggtcgagggtataagcattatcattaatcttggttagtatcttaaaaggaccagcaggacgaggcatcaatttagaacgacgcaaagtaggaaaacgatcctttctcaaatgcaaccaaaccatatcaccaggttcaaaagtaactagtttccggcctttactaccagtaatctgatatttagcattagcagcagcaatgttttgttgagtttgttcatggagattaatcatttgttcaacatgtgcaagagcatctatgtgtggggcgtccgcagcatcatgcgaaaacaaagcaataggcgccctaggaatgtaaccataaacaatttgaaaagggcacatctttgtagaagaatgggttgcatgattataagcaaactcaacatgaggcaagcaatcctcccaacgtttcaaatttttgtctaaaacagccctaagcatggtagacaaagttcgattaactacctcagtttgaccatcagtctgagggtgacaagtggtgctaaacagcaatttagttcccaatttattccacagagatctccaaaaatgactcagaaacttagcatcacgatccgagactattgtattgggaataccgtgcaaacgaataatctctctaaaaaacaattcaacaacattgctagcatcatcagtcttatgacaaggtatgaaatgagccattttggagaatcgatcaacaaccacaaaaatgctatccctccccttcttagttctaggcaatcccaaaacaaaatccatcgaaatatcaatccaaggggaagtaggaacaggcaaaggcatatacaaaccatggttgttcaaccgtgacttagctttctgacaagtagtgcagcgtgcaacaaggcgctcaacatcagcgcgcatccgaggccaaaagaagtgggcagccaacacctcatgtgtcttgtagacgccaaagtgccccatgagaccgcctccatgtgcttcctgtaacaacaaaagacgaaccgagctagctggaacacacagcttgttagcgcgaaacaggaacccatcctgtatgtgaaatttgccccatggtttcccattaatacaatggccgaaagcatctttaaaatcagcatcatcaacatattgatctttcacagtgtgcaaaccaaagattttaaaatctaactgtgacagcatggtatagcgacgagacaaagcatcagcaataacattgtccttcccgttcttgtatttaataatgtaaggaaaggactcaatgaattctacccatttagcatgacgacggttcagatttgtttgggtacgaatatgttttaaagcctcatgatcagaatggattataaactcacgatgccaaagatagtgctgccatgtatgcaaagtgcgcactaaagcgtaaagctccttatcataagtagaatatttcagactagcaccgcttaatttttcactaaaataagcaactggttatccttcttgtaacaaaacagcacctagcccaataccgctagcatcgcattcaagctcaaacactttattaaaattaggcaattgcaataggggagcttgggttaacttatcattcaaagtgctgaacgcttcctcctgggaatcactccaagcaaatggcacatctttctttgtaagctcatgtagaggcgctgcaatggagctaaaatcacgaacaaatctgcggtagaaaccggcaagtccaagaaagctccgaatttgtgtgaccgtcgtcggtgtaggccactcccgaatggcagcaatcttgctgctatccacctcaatgccctgtggagtaacaacataaccaagaaacgagacacgtcgtgtacaaaagatgcatttttccatgttagcaaataactgggcagcacgcaatgcatcaaaaacagcacgtaaatgttccaaatgctctttcttagatttgctttaaataagaatatcatcaaaataaacaaccacaaacaatcctatgaagggccttagaacttcattcatcactcgcataaaagtgctgggagcattagtcaatccaaacggcataaccaaccattcatataaaccaaatttcgttttaaaagccgttttccattcatcacccagtttcattctaatctggtggtaaccactacgcaaatcaatcttagtgaaaataatggcaccactaagctcatctagcatatcatcaaggcgtggtataggatatcgataacgaatagtgatgttattaatagcacgacagtctacacacatacgccatgacccatctttcttgggaacaagtaacacaggaacagagcaagggctaagagactcacgaatgtatcccttgtcaagcaacgcctgtacctggcgctgaatctccttcgtctcatccggatttgtacggtacggtgcgcggttcggaagctgtgcgccgggaatgaggtcgatctggtgctcaatgccacgaagtggtgggagacccggtggtaagtctttgggaaagacatcagcgtactcctgcaaaaggttagcaaccatagggggaatagccaaagatggtgcatcatcaagtgaaatgaggacactagagcatataagtgcatagcatggcaaatgagcaccgtgtagatcatcaaaatcagcacgtgtagcaagtaaaacaggagccttcaacttgatttcagaaggaacagagggcgatggatcaagttgtttagcagttatagcagctcgggcaagatcatctttaacaatttgttcaggtgtcattggatgtataattattttttgacccttaaaaatgaaagaataatgattcgaacgaccatgatgcaagctatcagtatcatattgccaaggtcgaccaagtaacaaagagcatgcttccatgggaataacatcacaatcaacaaaatcagaataagcacccatggagaaaggaacacacacggaacgtgtgatttttattttaccaccatcattaagccattgaatgtgatatgggtttggatgcttacgagtgggtaacgataacttttcgaccagcatggtactcgccaaattgttgcaactgccactgtcgataatgatgcgaattgaccgctcctgcacaacaccctttgtatggaacagagtgtgtcgctgattcttctcgggcaaagcgacctgtgtactgagaacacgctgcacaacaagactttcatacctatcagcgtcgctcgggttaacatgtacctccgccttagctgcatggtcagtggcaagtagtgcatgttcaatttcttcagaatcactagccgaagagtactcaccatcgtcacgaatgagcaaagtgcgcttgtttgggcagtcccgaatcacatggccaaatcctctacagcgatgacactgaatatcccgtgtatgacctgtgggtggggcagtgctggctggtttggtcgtcttctcgcgtggagtagtggtggacgtggatggcgcagggggatctggtgctgaggtggatgtcgagcttcgtcctgcaaaagggttagaatatggcttcgagcggcgtccctgcacttcacgttcagcttgcaagcatattcaaataaagtagtcatatcataatattccttataatcaagtatatcttggatttcgcggtttaaaccaccacgaaaacgtgccatagcagcgtcgttgtcctctaatatcccacaacgaatcatacctttttgtaactcctggaaatagtcctcaacagattgagaaccttgctgaaaacgctgcattttattaagcaaatcacgagcataatacgaaggcacaaatcgatgtcgcatcgcagctttcaactgatcccaagtggttggaatggtagtgggatgttttattttaaactcacgccaccaaattaaagcaaaatcagtaaattcactaatagcagctttaacctgagaatgtgcagcaatatcatggcatgaaaatttttgttcaacctctaactctcaatcaagatatgcagcaggatcatatttgccattaaaaggtggaattttaaatttaatcttagaaaataagtcattagggggatgacgaaccacacggcgtgcacgaccacggcgatctccatcttcccactcagtgtcaccacagtagtcctgctccatctttgtggtcaacgcatcaaggcgtgccaggatggtgtcgagtgtggtgcgagtcgctgtttgagcaaggtcaagctggttgaaacgctcagtcgtcgaagtgaccgttgaatcaagccgttcatgcatcgtcctaatgtcatcaacaagtccatcaacttgtccccttacttccagcaactgggcatccaccgtgtcgtgtgctcctgccatagttagcgcaaacaccaaaacaccaaaagaagaagaaaaaaaaacaacgacaaaaacaggggtgtactgctcacaaggcgctcacactagtgctgttatcaaattcttatccgttcttaccaagccacagtggtgaactgcaaccaacaggtggaaccggtgaaagattggatgagcgattgcctggagaaacagaagcctgctcgtcgtagaaatatgtggagttctgggtaggctgcactcaagtcaatgattagcacaatcaaacaataatgcaaagttgaattatagtgcagaacacgaaactatattgctggccacaagtgcaaaggacggatggaactagcagaatggcagtaccgtaaatattgtactagcgaggccactagtaggaatcacaagtgattttgtttttcttttttgtatgatttttttgatatttttctcagcacaagaagcaacaaaataggagctagacgaagtttcaccgaaaacagagatcagatgtggtctacaaaaaatcaggaagttctctgaaaagcgtgcgagaactgtgacagatttttttctttattttcctgaatttttttgacaattttgtcgaaaccaaatagaccgaaggtgagtttggccggcctcagaatggtgtcaactagctcctgtaaaaatttcagattttttggacacccgagcgaaaagttatgcccggtttaaggaaggtacctcaagttatgttttcaaacgaccgggatgaaacaactgtatcctttctccttcgttgttttttgtttctgtttttttttgacgtaaccgaaggagaaaaacaaggaaacgatgttgactcggtttgtttttttttgttttttttcgtaaccgaaggagaaaaacaaggaaacgaccgttgactcggtttgttttttctgttttttttgacgtaaccgaaggagaaaaacaaggaaacgatgttgacttagtttgtggcgtgatcaaagggaagatggtggcggcgctagggtttgaatggtggaagaacacaatgcaaccagcaacaaatgacgcgaaagcacacaaattcaacaatgcagattattgaaagaaagtgtgaggctcaaaagggtgttgggataaggtctaacctgaatttttatgtggttttgtggactgtaggaaaaaaacactcgataaactcatcgatcaacctggaaatctgataccaattgatgaagctgaggtgcccgatctttcggcgagtagagataattccgatttggcggaagatgacccttgcgatccgactacgacgagcaagcccgaggcgccaatgcaatcgctgaaccaactccctgtggttaccgaccttgctgatgcgaagatcgtttcctgtgcgcaatcgaagaacgaacaagaaaaagatgcgagcaatctaatctattactcgagggtggagttctgaatacacgaagacagcgcagatttgcgcgtgttcgagagtagctaaggctaacgtaaaacaaaactcaagaaataaaggaggcgcagctcctggataaatagagagggggcgcagcccctaggggcggccaaccctaggtcgtccattatgggccgcagttgggctggtcgtctattcttccgggccttcgttctttaacagcataatgtagttcaattctcttgcacgggcccgagtcactggcccaggtggaaggggtggcgcctggactggggaagatggtgcctgggctggagaaggtgctgctggtgtagatgtgctcgtgttggtgttgatgtcctcatcaccccgtgggccagtacttatattttaaggatgccctaaaaagcaccctattttcttttgagaggcgacgtttcttccagcatgcatgcattataaaacataaagaggaattaaaattttgagctaaccccctgtcttaaaatcatccgggctctctttttctttttccttccaccataatctttatctttgattcccttccgcagatgaattcacccacccccaccagtggaggagactctcgtttcagttctgatttcctttctcgcgatggctttccttccatcttgtgggaagtgcttaactccgccggttaccctacgccccctttgtacacggtgcagttgtatgaggagcatcgggtacctcgttgtcgggtctggctgactttggaggctcatccccttcagtcgggttggcattctcttgactctgagacgattggactcaggacggacgacaccgttgaggcagcagccatgaagactctgacgactttctgtggctaccatcccctggagatggtgatgcaccccttgggactcttccctgctgaaaagaaggatgatcccatgtggtgtaaccgtgtgagccatgtgaaggatgtgtgggcaatgtatcctgacttggttgggagggtcactgttcagtgcatgagtgcgctgtaccgccttcaagcccttcagagcgatgctatggcacttcttgctaacaccgctcaaactgccaagctcactctcgacagtcgggaagattttgtggtcgacctatccacagaattggtggagaaggatctgcaggtggaaaggctgagccagcgcattgccaccttggagcagcaggtggagatccgagacaacactatcgatgtcttggagaaccagcttcacgatgtgcagagggaactcgaagaggcaaatgaccacttggacatgcaccacctggagatggaggccaataaagcaggatgcgagggagaagaggctcccgaggagctaggaccagcccctggtgcctatgggactacctccgtgatgcctcctgatgtagctgaggtgcccgatctttcggcgagtagagataattccgatttggcggaagatgacccttgcgatccgactacgacgagcaagcccgaggcgccaatgcaatcgctgaaccaactccctgtggttaccgaccttgctgatgcgagatcgacctgatcacgaagatcgtttcctgtgcgcaatcgaagaacgaacaagaaaaagaggcgagcaatctaatctattactcgagggtggagttctgaatacacgaagacagcgcagatttgcgcgtgttcgagagtagctaaggctaacgtaaaacaaaactcggaaaataaaggaggcgcagctcctgaataaatagagagggggcgcagcccctaggggcggccaaccctaggtcgtccattatgggccgcaattggtctggtcgtctattcttccgggccttcgttctttaacaacatgatgtagttcaattctcttgcacgggcccgagtcactggcccaggtggaaggggtggcgcctgggctagagaaggtgctgctggtgtagatgtgctcgtgttggtgttgatgtccgcatcatcctccccttcttgaactgaagtcgtcctcgacggcaactcctcatcttctcccgcatacggtttcaaatctgcaacattaaaactagtggaaacaccaaactccgcaggcaggtcaaggatataagcattatcattaatcttggttagtaccttaaaaggaccagcagcacgaggcatcaatttagaacggcgcaaagtaggaaaacgatcctttctcaaatgcaaccaaaccatatcaccaggttcaaaagtaacatgttttcttcctttactaccagcaacctgattttttgcattagtagcagcaatgttctgtttcgtttgttcatgtatggtaatcatttgttcaacatgtgcagaagcatctacatgtggggcgttcgcagcattaagtgaaatcaaatcaataggtgccctaggaatgtaaccataaacaatctggaaagggcccatctttgtagaagaatgcgtggcatgattgtaagcaaattcaacatgaggcaagcaatcctcccaacgtctcaaattcttgtctaaaacagccctaagcatggtagataaagttctatttactacctcagtttgtccatcagtctgagggtgacaagtagtgctaaacaacaatttagttcccaatttattccaaagagatctccaaaaatggcttagaaacttagcatcgcgatcagagactattgtttttggaataccatgtaaacgaataatttctctaaagaacaattcagcaacaatgctagcatcatcagttttatgacaaggtataaagtgagccattttagagaatctatcaacaaccacaaaaatactatccctccccttcttagttctaggcaagcccaaaacaaagtccatagagatatcaaggcaaggagaagaagggacaggcaaaggcatatacaaaccatggttgttcaaccgtgacttagctttctgacaagtagtgcagcgtgcaacaaggcgctcaacatcagcgcgcatccgaggccaaaagaagtgggcagccaacacctcatgtgttttgtaaacgccaaaatgccccatgagaccgcctccatgtgcctcctgtaacaacaaaagacgaaccgaactagctggaacacacagcttgttagcgcgaaacaggaacccatcctgtatgtgaaatttgccccatggtatcccattaataaaatggccgaaagcatctttaaaatcaacatcgtcaacatattgatccttcagagtgtccaaaccaaagattttaaaatctaattatgacagcatggtatagcgacgagacaaagcatcagcaataacattgtccttcccgttcttgtgtttaataatgtaaggaaaggactcaatgaattcgacccatttagcatgacgacggttcagatttgtttgggtacgaatatgttttaaagcctcatgattagaatgaattatgaactcacgatgccaaagatagtgctgccatgtatgcaaagtgcgcactaaagcgtaaagctccttatcataagtagaatatttcagactagcaccgcttaatttttcactaaaataagcaactggttttccttcttgtaacaaaacagcacctagcccaataccgctagcatcgcattcatgctcaaaaactttattaaaatcaggcaattgcaagaggggagcttgggttaacttatctttcaaagtgctgaacgctacctcctgcgaatcactccaagcaaacggcacatctttctttgtaagctcatgtagaggcgctgcaatggagctaaaatcacgaacaaatctgcggtagaaaccggcaagtccaagaaagctccgaatttgtgtgaccgtcgtcggtgtaggccactcccgaatggcagcaatcttgctgctatccacctcaatgccctgcggagtaaccacataaccaagaaacgagacacgttgcgtgcaaaatgtgcacttttccatgttaccaaacaagcgagcagcacgcaaagcatcaaaaacagcacgcaaatgttctaaatgctcctctatagacttgctgtaaataaggatatcatcgaaataaacaacaacaaacaaacctatgaaggcccgtagaacttcgttcattaaacgcataaaggtgctgggagcattagtcaatccaaatggcataaccaaccattcatataaaccaaatttcgttttaaaagccgttttccattcatcaccgagtttcattctaatctgatggtaaccgctacgcaaatcaaccttagagaaaataacggcaccactaagctcatctaacatatcatcaaggcgtggaataggatatcgataacgaactgtgatgttattaatagcacgacaatctacgcacatacgccatgacccatctttctttggaacgagtaaaacaggaaccgagcaagggctaagagactcacgaatgtaacccttatcaagcagcgtctgcacctggcgctggatctccttcgtctcctctggatttgtacggtacggggcgcggttcggaagagaagcgtcagggatgagatcgatctgatgctcaatgccacggaggggaggaagacccggtggtaagtccgtaggataaacatcagcatactcctgcaaaaggttaacaacagcagggggtatatccaaagacggtgcatcatcaagcggaacaagcatgcgcgagcatacaagtgcataacagggcatatgagcttcatggagatcatcaaaatcagcacgtgtagcaagtaaaacaggagagtgcaacttgatttcagatttaataggtgcggctgatgtcgatttgacttgttgtgcagttttagcagccctagtaagatcatctttcaaaatttggtcaggggtcattggatgtataattattttctggcctttaaacatgaaagaataatgatttgaacgaccatgatgtaaactatcagtatcatattgccaaggtcgacccaataacaaaaagcatgcttccataggaataacatcgcaatcagcataatcagaataagaacccagcgaaaaggggacacgtaccgaacgtgttacctttattttaccaccatcattaagccattgaatgtgatacggatgtggatgtgtgtgagtgggcaaggataatttctctaccaacgctgtactagccaaattgttgcagctgccactatcgatgatgatgcgaatcgaccgttcgtgcacgacgcccttggtatggaatagagtgtgtcgctgatttttttcggcctgggcaacctgtgtgctgagaacacgctgcacaacaagactctcatacctatcggcgtcgatgggatcaacgtggacttcctcattttctgcatggttagtggcaatcatagtatgactagtttcctcagaatcactggctgaagagtactcaccattgtcacgtataagcaaggtacgcttgtttgggcagtcccgaatcatatgtccaaaccctctgcaacgatggcactgaatatcccgtgtacgtcctgtggaagaagcggcgcctttggcagggggcgccactggcttggtcgtccctgtgcgcgatgtagtgctaggcgtaggaggtgcagggctggaaggagttgagctgtgtgttggaccccggcctgcaagagagttagtatatgtctttgatcgtcgtccctgcacttcacgttcagctttgcaagcatattcaaacaatgtggttatatcaaaataatccttataatcaagtatatcctgaatttccctgtttaaaccaccacgaaaacgcgccatagcagcgtcatccgactcaaccaaaccacaacgaagcatacccttttgtaactcctggtaatattcctcaacaggctgtgaaccttgttgaaaacgctgcattttgttaagcaaatcacgagcataataggaaggaacaaatctgtggcgcatggcagtttttaattgggtccaagtaatgacactgttaatgggaagtttttgtttatactcacgccaccaaattaaagcaaaatcagtaaattcactaatggcagccttcacttggctattagcaggaatatcatggcatgaaaatttctgttctacctctaattcccaatcaaaatatgcagcaggatcatatttaccattaaaagatggaattttaaatttaatcttagaaaataagtcattagggggatgacgaaccacacgacgtgcacgaccacggcgatctccatcgtcctgctcagtgtcaccgtcgtattcctgctccatctttgtggtcaaggcatcaaggcgtgccaggatggtgtcgagtgtggtgcgagtcgccgtttgagcaaggtcaagttggttgaaacgctcggtcgtcgaagtgatcgttgaatcaagccgttcatgcatcgtcctaatgtcagcagcaagtccatcaacttgtccccttacttcttgcaactgggcatccaccatgtcgtgtgctcctgccatagttagtgcaaacaccaaaacaccaaaaggagaaaaaaaaccaacgacaaaaacaggggtgtactgctcacaaggcgctcacactagagatgttatcaagttcttatccgttcttaccaagccatagtggtgaactgcaatcaacaggtggaaccggtgaaagattggatgagcgattgcgtggagaaacagaaacctgctcgtcgtagaaatatgtggagttgtgggtaggctgcactaaagtcaaggattagcacgatcaaacaataatgcaaagttgaattatagtgcaaaacacgaaactatattgctggccacaggtgcaaaggatggatggaactagcagaatggcagtaacgtaaatattgtactagtgatgccaaaaaggcactagtagaaatcacaggtgatgttgtttttcttttttgtacgatttttttgatatttttcttagcacaagaagcaacaagataggagctacacgaagtttcacctaaaacagatatcagatgtggtctacagaaaatcaggaagttctctgaaaagcgtgcgagaactttgacgaatttttttctttattttccagaatttttttgacaattttgtcgaaaccaaacagatcgaaggtgagtttggccggcctcagaatggtgtcaacaagctcctgtaaaaatttcagattttttggacacccgagcgaaaagttatgcccggtttacggaaggtacctcaagttatgttttaaaaacgaccgggatgaaacaaccgtatcctttctccttcgttttcttttttttgtttctgttttttttatgtaaccgaaggagaaaaacaaggaagcggtcgttgactcggtttatttttttttctgttttttttcgtaaccgaaggagaaaatcaaggaaacggccgttgactcggtttgttttttctgttttttttgacgtaaccgaaggagaaaaacaaggaaacaatgttgactcggtttgtggcgtgatcaaacgggagatggtggcggcgctagggtttgaatggtggaagaacacaatgcaaccagcaacaaatgacacgaaagcacacaaattcaacaatgcagattattgaaagaaagtgcgaggctcaaaagggtgctgggataagatctaacctgaatttttatgtggttttgtcgactgtaggaaaaaaacgctcgataaactcaccgatcaacctggaaatctgataccaattgatgtagctgaggtgcccgatctttcggcgagtagagataattccgatttggtggaagatgacccttgcgatccgactacgacgagcaagcccgaggcgccaatgcaatcgctgaaccaactccctgtggttaccgaccttgctgatgcgagatcggcctgatcacgaagatcgtttcctgtgcgcaatcgaagaacgaacaagaaaaagaggcgagcaatctaatctattactcgagggtggagttctgaatacacgaagacagcgcagatttgcgcgtgttcgagagtagctaaggctaacgtaaaacaaaactcggaaaataaaggaagcgcagctcctgaataaatagagagggggcgcagcccctaggggcggccaaccctaggtcgtccattatgggccgcaattgggctggtcgtctattcttccgggccttcgttctttaacaacatgatgtagttcaattctcttgcacgggcccgagtcactggcccaggtggaaggggtggcgcctgggctagagaaggtgctgctggtgtagatgtgctcgtgttggtgttgatgtccgcatcacctccttcacccgtatccagtgtcgcttccaccgctcagggttaagcagtcacttcgacacttttaggcggatagaaacctatgcgagcttagaaatatcacattttggactaggcttatgggtactttcccctgattgatgtaaccctgtaaacttttgaaatctgtggaccttttgtcaccatgttatcttcatttcgaacctaatattatgattatggcatttttccttccatatgaaatgatatcttgccgttcaaaattgtgagttgggataacaatggcgacaatctctgttttcagatggcagctaggcagcgtcgcgggcataacgagcaggttcccctgccacctcctccagctcccacagtgcaggagctgatggcccagcagaatgagattctgcgacagctcttgcagcgtcagccccaccctcagcagcatggtggaggacagcatcagcgacctccggctatggcaacttaccaggagtttctgagcacgcagccgcccttgttcaccaaggcagaggatccgttggacgccgacgtatggcttcgcgtcgtcgagtccaagtttcccctcctcgcaggagtctgccctgatgaggccaaggctcgcttcgccgcgcagcagcttcgtggcccagctcggacttggtgggaccactttcgtgctatgctccccgctgatcgtgaggtatcttgggaggaattcaagattgccttcagatgacaccacatcccagctgacattcttgatcggaagctgaatgaatttctggcccttaatcaaggaacccgcacggtactgcagtatgcgcaagccttcaatgacttatgccagtatgcagggtatcatgctgattctgatgagaagaagagggatcgcttccgcaggggtctcaataccaagctgcgggaacgactcaacactgtccgggctgatagcttcaatgagttggtcaacatggccatctcacaggaggattgcattgttgctcaccgggcagagaagaagagaaaggcaccaatggcagcaccatccgctcaggctcagaggttccggattgtttctcacaatcagagtaggggttttcagcagcaggcaggcagatgggtgatcaggccacctcagcagcagcagcagccgacacccaaccgctacccagctcccgctccaaggaacaatcagcctccgcagcagcagcagttccgccagggcaatgggaacaagtgtttcacttgtggtaatgtgggccactatgccaagaattgtcccaggaaccagcagaagcagatgccagcaccaaatcaagacaagggaagaaagcagaaggtgcaagtcaggcaagggaagctcaacttcactactctggaggaagtacctgaaggagctcctatcatgaccggtaccttttcagtttataatcaacctactttaattctgtttgattctggtgcatctcatagtttcattagccaaaagttcagtgctagatgcaaactgccattctctcactcaaaagggtcattcatgatagtcacacctaggggtaaaattgcaactaatcaattaaaccaaagtgtgcctattcaactgggaagccacattgtcaaaaccactcttcttgtgttgggattggaaaatgtggacattattctaggggcaaattggatgaccttgcaccaagttgtgcttgatgtagccagtcgtaccgtggaagttaattctcctttctgcgggaatttcactttgattctgcctagttagggttcttctcagtcatgtgctttctctatgacggagttacccctgaagaagatcccagtggtctgtgagtatgcagatgtcttccctgatgaattgccaggaatgccaccagaccgggatgttgaattcgccatcgagttgcaaccgggaacgaccccaatttccaagaggccctaccgaatgccacccgctgagttggcagagttgaagaagcagttgcaagaattgctggataagggtttcattcgcccaagcacttcgccttggggatgtccagcactatttgtgaagaagaaggatgaaagcttgaggctgtgtatagattaccgccctcttaatgcggtaactatcaagaacaagtatcctttgcctcgtattgatgttctctttgaccagttggtcggggccaaggtgttttccaagatagaccttcgctctggctaccatcagatcaaaatacgagcaagtgatattccgaagacggcattctcaaccagatatgggcattatgaattcttggtgatgtcatttgggctgacaaatgcaccagcatatttcatgtatctgatgaattctgttttcatgccggaattggacaagttcgtggtggttttcatcgatgacattctggtgttctcaaagaacgaagaagaacatgccgggcatttgcatgtagtgcttcaacgtctgcgagagcaccacctttatgccaagttatccaagtgtgatttttggctaaaggaaatcaaattcttgggtcacactatctctcaggctggaatagctgttgatcctgataaagtacaagaagtgatgaattggaggccaccaacaactgttcgccagattcggagttttctgggattagctagttattaccgaaggtttattccggacttctctcgaattgcgaagcctattactgagttgctgaagaaagaagtcaaatttgtgtggagtcagaagtgcgaagatgccttccatgcattaaggcagcatctgaccacagcaccagtattggcgcaacctgacagcagcaagccttttgatgtgtattgcgatgcctctagcaccgggctaggttgtgtcttgatgcaagacaaccgagtcattgcttatgcctcgagagcactcaggcctcatgagcaaaactatcccactcatgaccttgagttagcagcagtggttcatgcattgaagatgtggaggcactatctaatgggaacccactgcaacatcttcactgatcataagagccttaagtacatttttactcagactgatctcaacatgaggcagagaagatggctagagctgatcaaggattatgacctggaggtacattatcacctaggaaaagctaatgtggtagcagatgccttgagtcagaagttgcaatgcaattgtattctgatggattctcgcattaacaccttgtgtgatgagttgagcaagatgcaagttgaagtgattccttctggttctttgtctcacatttctgttgagccagctttgcaagaccagattatcatggcccagctcagtgacaagggagtgcagattatcaaaaagaatctccatcagaaggttgagaagtataattgtttccaccaggatgagaagggtgtgttatggttcaaaagcagattggtgattcctaaggaccaggatctcaagaggaaaattttggatgaggctcatctctccaaattctctatgcacccgggaagcaccaagatgtaccatgatctgaagcctttgtactggtggaccagaatgaagagggagatagcccagtatgtatcaaagtgtgacacctgtcagaggataaaggcaagccacttgaagtcagctggagctttgcaaccactgtccgtaccttcgtggaagtgggatgacatcatcatggatttcattgtgggtctgcccaacacctctcgtcatcatgattcgatttgggttattgtggaccgattgacgaaagtggcacattttcttcctgtgcacaccactgataaggctcagaaatatgcagaattgtatattgaccggatcgtgtgtttgcacggattacctcggaccattgtttctgaccgaggagcccaatttgttgccagattttgggaacaattgcaagagtctttgggaaccaagctaatcaggagttcagcttaccacccacagactgatggtcagacggaaagggtaaaccaaatcctgaaggatatgctgagagcttgtgcgatcgattgtggcaagaactgggataagcacctctccttggcagagtttgcttataacaatagttatcaatccagcctaaagatggcaccttttgaagctctctatggaaaaaggtgtaggacaccactcaattggtctcaacctggtgaaagagaagtttttggacctgatttagtgactgaagctgaaaggaaggtcaagctaatcaggaagaatctag
